United States Patent Application Publication US 2026/0137732 A1 - sequence listing, part 2

SEQ ID NO: 2 - DNA, 3200297 bp, Akkermansia muciniphila (residues 1-1,600,149 of 3,200,297)
  source 1..3200297: mol_type = genomic DNA
gtctgttcatgtcgacccctgtctgagagattttctccttagtaagaaagcggtacacgctcacggcagaaatacggtagtcgcgggcactcgtaccaaggtcttctatgtgcttgtcccgtagaagtttgatagtcttcttgcgtgaccatccgcaggctggatgctgcgccaggtcgtttatagagagttccagcttcccgccaaacatgcgggctgccttttcctcgtcgccttcatttacgagcagcaagcctcggtcatgcaaactctgaatagtctgctccacaatggatactataaattgcttcaatccttccatgatttttgacaattaagatttaacgtgaaataaatgatcatgccgcgggcttcttgggctgggagggttagcgggctttcgccactgaacggggagccacgtttttgtagtagtcttcgaggaactcggagagcagaaaccggggacgcgtcaacccgcaaacgacgtgcgtccgaatctttccggcttttacccatttcgctgcgttgatggcgtgaataggcttttctccggttttctcacgggcggccttgcatacttgagcaagggacattgtctgttcgtactgttgttctttcatagttgtttataaaaaggagttaatggcgaaatagacgattgttccgaaccctgttaccagggcacaaaagacaaggttctggacgattccagatcggggcttgaggtcattttccggcaggtccatcgggcagccgtataggaattctgtttttgcgtcgcggtctcggcgcatccagtattgttcatttgtcatttttctcattgttgttcggggttgggtttaaagctcgtaccagccgagccgcttcaattcttcgataaggacctcttccatagttcagtctctatggccgtcgggattgtctgttgtggcgtgatcgcgttcgtactgcacaagggcgttttcgagggccgccgctgcggtttcgtgctccgccatcagcttttcagcgtccgcgtggctcacggctacgtcgtccacgcggatgcagcggtcttcggtgtcgtattcgataatcatatttacctttctttttttggatattatcgttctaacaaatcctgatttactatttcagcagaagaattcaacaaaatatttcctattttgtcatttttctctggattaaaccgttggattcttggtttcaggatgcttacccttgcgaggttggggaagcttgctggaaggagtcaggacaaatcccagtcgtcgggcttcttggacaagaagggtcttgatcacttctttggggcgaactccctgttcggcataggccaacaggcaattcttaatgccgtcctccattttatcgagtttgatgattgagtacatggtgttgcgtttgatgattatttttttacagtgtatgctgacattatgcaataattatttccgcatttggtgaataatgtttttaataggacgttgacatttcatcaaaatgctgtaatatcaatgtatgacgccgaccaaggaagagataaaaaaatggctcaagacctcacgcaaatcccgcgaatggctcgcagaacaatgtggagtttctaaaagacaggttgataattggctgagttctgcgcgtcctgttcctgcaaaggctattctgatcatccagcgcctcatggcagaaaaagcttgtcccatttctccccaggtagagcttgattttacggatgaagaatgggccgtggtgagcgcagccatgacagccactcaacaaaccttcatggaatttatcaacagtgcattccgtaacgcactcaaagagttcgcagatataacgcttcagaacacagctaaagaaaaagaagatgcccgcaagcagtttgtcccggtgaaagcattctcctctataatatcaaccagcaacgaaaggtacaatctgtccgtgatcggcaatatcgccgctggtggattgcaggcaggtgataccattccttaccatatcaccgcaaaccgccctctgggaaaagatgagtacgtcctacgcgtagaaggaaaatccatggagccgatcatcccagacggggcccttgtcattatgcgtaagcacactatcccccccataccaaaacccggcacaatcgtggaatactacgatgaacgaggtgtaacgctcaaaaaactggccaggaagaagaatccggaaaccgggaagatggactacgtcctacacccgcttaaccctgcttttggcgacattgaacccatggacggcggccgcgtttccgccgtgtatgtggaaacgttgaaggattggcgcaaagaatagaattttttctggaattaaattcattctgtcttgacttcattctctcctttctcatgattttatcatgttgttcaacggtaaaatcattgctctccttactcttactggacttattggaggaattatagggggaacaatcgtttggttgtgcgttcgaccctcccccacgtccataagcttttctcaagcccctccggagatagtcaaagctgacctagtttctacatgggaacttgcccaacaaaatgatctttattccctggaaaaactcgccgacacttacgaaacaggtgaatgcgtggaacaaaatattccacgagcgctttcttataggaaaaaggcgtctgagataggaagtgcggaatcttcctatctagttggatatgcatatgaaaaagggatcggaatcaaaaagaatggtgcaaaatctgagaaatactactggcaagcggcaaaaaaagggcatcccaaggcacaatattcgttagctttacattcttctgggttggatgaaggcgaaaatgatcctttttccccatcgctcaagtttaacatatcaaaggagaaggccttatctcttttgaaaaaatcagcgaaccaaaactacggtttggcagaacacatgctcgcaggtttttatttagaacaaaagaaatacgacgaagctattctattttatgaaaaggcggcaaagcacggagaaaaagataaatggaagttggagcaagctaaaaatggaaaaatgaatcaagcgatcaccattgaaagtccttccacagaaattctggaagaatttaatgatggagatattgaatacaaatggaaagtacttcttaccaacacctctgacgctttatggaacggctctgtaactttcaagcttttagatattaatggaaaaacaatagatgaggccatcaaatttgatatttccatacctgaaaagaaaaatatcatagtagaagggactcgttctatatcgaaagaaaaatttaattctaagacaaaaatcaatgtcaatgttgaatatagaaaatgatcatatatttcaaaaaaataattaaatgtgcttgttgtgctcttctattttcgggagaggggcaagcctttgaagaatctcacgaagtctcatttgatattagccaggttaaagaaacatcactgctcaattccttgactaaaaaagcattggaaggcgatggggaggcggcctacgaggtaggcagaatgtacctacttggaaaagaagtcccaaaaaatgatcaacgcgccttttggtggttcgagcgaggaaaaaaagatggagatataggagcgcaaattatggttgccagatgccatatatggggatgggggaccaatgcggatccaatagaagctttaaaaaatctaattactcccttaaataataaatctagcttcgcaatattaacggcatgttccttattagacacacatccagatatttttattagctccaaggacgcaagaaaaacatcaacctcattagtgttgatgctcacaaaattattagaagaaaaaaatgatccagaacttgctaaagagtgtgccgaaaaattacaaagctttcttcaaaaatctaaagacaaagcgtctatagaggcaacatttgctaatctgactaaaaaacaagcccaacgacaagttagacaacaacaaattacccgaagaggagctcctttgagtgttctaagcaaaggcattaaaaagacttctgaatccatgaactatgtatattattcttggaaagcagagatacttaacactactggaaaagatttaaatatggtagctaaacttgtaatcaaagacagaaatggctatcaggtagagtacacatactcctcgcaaactgttattcccgctggagatagcaaggttattagctcgcaaggaatgctagaacagcatttatggaagccaggaaacacgattgaggttattccttatgaacgttaaataatacttcctcatttggcaaacgcttaccataataggaacattttagtattaagttattcctaaaaagtagaatcataagaaaaaacttgccgctgtttgccatttgggaaaaatgcccacatggatgacataaaagacaaaatccgggtgttcctgaaggatatggaaatgagcagagaggtttttgccgatctttgtggcgtcagcaagagtcaagttgataagtggctttcctaccttccaattccagaagcacggcaacgtgtcattgagcgcatcatgaaggaagaacatagccgtcgtcaaaagagtcagcatgaccctgacatggacattattgaggttccctttcctcgaagccaatttgaccgggttcgaatgacggcggacatccatggtatgacgattgaaaaatgggcttccaggacgcttattgcactctccaacgtcccgcatcataatttatagttacgccaaagtatacagggaaagagacgtacatataaggatttccaatgaggttaccggcttattcagattgaggcggtcagacgtggactcacaacggaagagtggcttgatgcaacactgcatcttcacacggcaatgccgtacagagtatagtagtcccccactgtctgaaagttcgctatacaaactattaaaaagactgatttttcccttcgaacagcgttcattgaaactttttccgtctctcgtattttcaaaattacttatgcgaatacgagacctaatcagacggttacgagatgccggatttgtcctcgcaaggactaccggtgatcatcgtatctacgaataccgcgatgcaaccaacaatcatctaatagcagaagccactatcagccaccatgataacgaccatgctcccctctatctcatagaacaggtacgggatgctattatagctgcaggtggaacctgggaagattaacgtcttctctctgctatattcaggagctacctctattggggtagctacttttttttgttgaatgcatcacctcttgttttcccttttccggtatgataattctagggaatgcactcaaaaagtgacatcaagaaatggctcaaggaaaacggaaaggactgcaactggctcgctgaacaatgcggagtcagcattcacacggtttacggttggatgtcgtcacgccgtcctattcctgtaaagtcacgagcccacattgaagatctgataggtgagatggagccacccctgggcgtgatcagaggagtggaggcgggaagtttggaagccctgcagatggaaaacaccatcctccgggcgtggattgcgctgcacctgagacctagcgaagtagtggatattgatgaatggatccaaagtcgaatagagaacagacaattttcttaaaatgttggaaatagccattttgaaccatctttaagagagttaagcatattatttacaaactctttcatttcatggtattatggattgcatatgaaaatgttctctctcattttcgcggctatttccctcatagcattctcggatgcccatcctggcgggttggacgccaatggaggccattacaaccgcaagacgggtgaatatcactaccaccgaaaaccggcagccaaaccaacagcagaagaaaaagcgtactggatcagttcgacgggcaagactcacaataaaagctgccgatattatcgagcttgcaaagggcatgccagtgacacgcctaacggcgtaaattgcaagatttgtggaggtactctaagcggtaaatagctatgatattatttgtcccgcgtccagtacatacttttacattattctacggagaaatgatattctcttaacattatctccatcacgagcccctatcctgaaaaataagcaatgattgacgaacaaccgaaaaagaagtgtagaagagttcattaccgcaaatgtgagatcataaataaccaaaatgagcttttcactctaaaaacagagcaaactctagaacaacttttggataatgcctttgcagaattggatgggaatgaggatattaatagactttacagagggcattcggatataatagaggaattctccgctcaggacagaaaattagctaaatacggagaatgcaaatgtgggaccatcttcctaacaaaaaaagctgcacatgttcccgctagaggaatatctgattccggggtatttatcactcatgcaaaaaccgtcacggaaaaaggagaagttcctccaataaaacaaatcgttatctttgctatctccggcaaccatctagcttacattgcagaatcaaataatggagatacccgtctagctgacttcttctcttggttcttgaaaaccaagacaagtattctgcctatttcatcgtctatacacttaaataacaaaatttgtattaatattcagaaatctattaaacaatatggagtaaaaaaagtgatgttagactatcccccactccatgcgagtggcgatatcggtaataatgtaaaaaactccttaactctaccatcctctcctgtcgtccacacagaaacaacatatcatcctctggatgactgtcgaatccaagttactatttcatctggttccaaaaaaaatcacaatctggagtctatccaacaacttgccacaaaggcaacggaaacagacctagacaacttagttgttattctaaacaatggtcttaaaatcagcaaagacgaactgcttccctctggacaaatacagatcaatttcaataaagatgtaatcagtcagataaacgccatgcaagaagtttcaaaatggttgactgcacaattaaataatcatactatccattaggatgagttcaatacgacaggaattaaggaatggtattctacggactcaattgggcatatggattcctattattttaggattcgtaggattattaatacttttgtatactggattttctgtcatatcattctatcccaacctgccgagcgttttaaaactgctggcaggattggcggctatcctttcagcatcagcatataacttgcgtataaaagcacttgattattcaatcaaactcatagagcagggattccctccggagtgcgcaaaagaaaatatgggaaaaacaagttgtactttgacaaaccttgttttgttaagttttcttacatcaatcttcttgtttttctcaacaaagactattcttcaaagttatatttttggaaattttatattgtgcttatcttgctcaatgcttttagcttgttgtgtgcaatacgtttatgtgctttttgcttttgagaagctggaagaaactattatgcaaaacaaatgtattcaaaaacaggaagaacaaacgactcaagagttacaacatagaaaagaattaagaaatcaaccggataccccaacccctgaaggctgggaaacataattctttccaatcaatttttctcacctaagtctggtatcaacttccaaaagcgtttcaccatctctttggtaagttctgtcctagtgctgtaccgattttgtagcgattctctcttttcatagagcaagatgcttcaaggcctcttctatggcttcagaatccggatggaagtacacccgggaatcatgtcccacaattacccggcagaggtcaacgagaacccccgacttcaggagaaatttgccagtaggcgggcacctcttcaggattgcaggccgtcaggtagtatttaatcgtcgtcttgctggtggtgtgccccatgttttccagcaagccgtgcgtgtcccgatgggcggctagccagtaagaagcgtaggaatggcggcaaacgtcatttagatggctaatgctggctccacggcgcaccgcttgccatttacgctgccagttcttcggagccagcttcccagtgcgtttttctggcggtacagtttccagccacgccttgaggtttggctcaatccgcaccagccgcacggagttggttttgctaacctctggttcaatcctgatatagccatgagccagcttgacgtgctcccacctcaatgcggtaacttcttcaggccggacgccggcgaaaagcaggacggccaccgctattttcatatccgccgcatttacacgcaggttttccggcatagtcccatctccggaatagtcccggcaggcatccagcagagaatgagcttgcgcgggcgtaagaatggagatgggcgcccgctggtgcttacgctgcttgattccttcggcgggggactgcacagcatacttcttactgatggcccaggcaaaaaacggcttaatatggcgcaatgcagaattatatgaaggaggagtcgttttccatccggctaaccatttttcaaattcatccggcgttacatcgtcaatcaggcaatccccaaatacagaggcaaaagcacctaaaacctgtcttacacggctccggtaatgagaagaggtatcttgtagcgtatcacggtaaagaggctcaagaatggatattttgcgggcatcgctggcccgatgccgtgtgatgtaatagtcaataacatccttaagcgtcacgtcaaacggtgctaaacgggcaagttcttcgatgacggcatcatattctgatctcgtcatcaatgtttcccccaaacgcaaccccgcagccacgtcttccaggttggtaatatatcccattgcttccgccttggtcgggaaatactttgtttccctctttccggttccggaaagcttgacagggatgcgaacctgccagcgtccgctttgagcgtgcttcaccggagttattttcaggcgtttcatgatgccctcacagtacgccaattttacgccagaacggaatcaaaaaatggtatttggtcatcatttatggctatttttccatggtttttcacatttccggctccaaaacaggcaaaaaagaagccctgtaagtcattgaacttacagggctttagaaaatgaatggctcccccggttgggctcgaaccaacgacctagtgattaacagtcacccgctctaccgctgagctacaggggagtttgcgttccatggagcgcggagggatttttactggaggcacaggcgtttggcaagtacttttttgtttctgtaggctttttgacgcaaaaaggcttccgcggcgtgggcatgccaacggtgtttcttgacctttgaggggagaatgcccagactttcagcgacatgagtgaacatcaccatcatattgctgttctggccggcgacggcatcgggcccgaggtcatggcggaggccctgaaggttctggacgccgtaagttccaagtttggatttaccgtgagccgcaaggaggcttttgtgggcggcgcgggcatcgaccattgcggcaaggcccttccggaagagaccatccgagcctgtgaagaggcggacgccgtcctgttcggctccgtaggcggccccaagtgggagcaccttcccgccaatgaacagccggagcgcggcgccctgctgccgctgagaaagcatttcggcctgtacgccaatctgcgcccgggcgtatgcctgcctgccctgacccacgcctctcccatcaagaatgaattgatcgaaggcggttttgacattttatgcgtccgggaactgaccggcggcctgtacttcggccagccccgtttccgcgaacaggagggggacgacgaagtcgtcgtggataccatgcgctaccacaagagcgagatggtgcgcatcgccaaagtggcgttcgaggccgcgcgagggcgccgcaagcgcgtcaccagcgtggacaaggccaacgtgctgaccaattccctgctgtggcgcgagacgatgattgaggtttccagggattatccggacgtggaactgctccacatgtacgtggacaatgccgccatgcagctggtgcgcaatccccgccagtttgacgtgctggtgacggagaacctgttcggggacattctttccgacgagatggccatgatctgcggctccctgggcatgctgcccagcgccagcctgtgccagggcaatgaggacaacggcctgtttttcggcctctacgagccttccggcggctccgccccggacatcgccggcaagggcattgccaatccgatcgcccagattctttccctctccatgctgctgcgctattccctcggggaaaaggacgcggcagacgccattgacgccgccgtgcgccgcgtgattgaacagggctaccgcacgcgagacctggctacgggcgcctccggagaaatccgcgtgaataccgcggaaatgggggataccattattgcggccctttaagggggcgttttcccgctccgcaggcgcattccaccgtctgcggggctgtcacctccggaagcggggggaggcacttcctctgttcttccatttattcccgggcttttccggttcttcattcaacgatcatgaacgttcttatcatcggccagggaatcgccggaagctgcctggcatgggaattgaaacgccgcggcacggatttcaccatcacagaccgccctattgcggaaacagcttcccgtgtggccgccgggctggtgaatcccctgacgggccgggccttccgccccggctggcggcaggaggaatgcctgtccgcagcggaggccttttatccggagacggaacgggaactgggcggctcctggtggcagaagacccctattttccgggaactggaaacggaggaccaactggaagtctggcaggaacgccagacggccccggagtcctgcgcctatgcgggcccccttttcccatggcctgaacactgggaaggccgcggaaaagccgcctatacgcgcggctccgccgtgctgcacgtggaggacatggtcaacgccatgcggaagtttttcacgaaacagggccgttttgtggaagcggacgtgtcccccgcggatatccgtccggatgaaaacggccttttccattggaacgggcagaagttttcccatatagcctggtgcaccggctgggaggccggatgccacccggacatggctcccttgaagggacgcccttccaagggcactattctggacctggacctgaaggagctggactggcacgccggcatcctgcatttcggccactggctggttcacaacggttctttctggcgcttcggcgccacttacgcgtgggcgtgggacgctcccggcattccggaagcccccgccgtccaggaattgatgctggacctcgtcaaacgctattccggggagacgggcttcctccgcgcccgcgccgccgtgcgccccatcatccggcgcagccagcccgtcgccgggcccattcccggcctgaacggccagttcgtcttctccggactgggcagcaagggagtgaccacttccccgtgggccgcggcccagctggcggaacatcttgtgcacggggcggaactgccgccggacctgcttcccgccgcactgtggaaataatgcggcgcggttcccgtacttccttgaacgggacagctattttccttgtcaaaacgccctgaacacgattacatgcggccttatatgcgagcggagaacgagaactggggagatacggtacgggagcatttgtttgaccagcgcggcgccgtgatggtgcactggctgatcctgctcaatgtggtcgtctttatcctcgggtttttcttccaggtggatattccacgggatatttacccgccgggccgtctggacctgatccagctttacggggcctacagtgaatacacgtgctttcatgaaggggaattgtggcgattgttcacctaccagttcctgcacgccaatctggggcacatcatgttcaacatgatcgccctgtggtttttcgggccggtcgtggaggaacgcttcggccatctgcgcttcctgctgtattatctcttctgcggcgtggcggcggccctgttttcctccctgctggggtacatggggttctttgatccggaatggcgcttcattcccatggtgggggcctccggctccatttatggcatcatggccgcgtgtgcggtgctttttccgcgcgcccgggtgcagcttctgttccctccggtcaatttgagcgtgcgccagttcgccctggccgtcctcggcatcgcctgcgccgtcattattttccagtggaacaacgcgggcggggaagccggacacctgggcggcatgttcgccgggttcatcctgacattgctgatcctgtggaaggaaaaactgtcctctcccaggcggcgggtcgtttcttcctcccaccattccacctcgcactccgcacgccgccccgccggtaaccatccctccgaagaggaggtggatgaaatcatggaaaaaatatcccgctccggcctgtccagcctgacggaagaggaacgggaagttctccggcgcgcctcccgccgttgaattatttgttagatattccccgaatttttgttatttttctttctttttcattatttcctcctagcatggaggaatgatgacgcggctgtattcctccaccgttctgggcgtggatggcgtagaagtggaggtggaagtggatttccgccccatggcggaaaaacgcacctttatcgtggggctgcctgatgcggccgtgaaggagagcgggcagcgcgtggatacggccatccagaacagcggactgcccttccagcagggcgttttcgtcgtcaatctggctccggcggatttaaggaagcagggaccggggtttgacctccccatcgccctgggaatggttgccggagcggcggaaagggacatggacgcttcttcctggtgcatcgtgggggaattggccctggatggcgccgtacgccccgtgcagggcattctgccgcagattatggaggcgcggcgcatgggcaggaagcgcatcatgctgccacgtgctaacgcgcacgaaggaacgcccgtgcagggcgtggagatttaccccgtggcttctttgaaggaggcgtgggcactccttacctcctccgttctgccccctcccttcacggcttccggaagagaggaccgggaggccgaagacaaggaggctgccgttgacttcgacgagatcaaggggcagccctatgcgcgccgcgccatggagatcgcggcggcaggcggccataacatccttctctgcggttctccgggttcgggcaagtccatgctggcgcagaggctcccgaccattctccctccgctgaatccggaggaagctctggaaaccagtaaaatccattccgtatgcggactgctgaaacgggggaacggcctggtggcccggcgtccgttccgggctccgcaccataccatttccgatgccgggctgatgggcggaggagcgaatatcacgccgggggaagtgtccctggcccacaacggcgtgctctttctggacgaattgccggagttccgccgcgccgcgctggaaactctgcggcaaccgctggaatccggccaggtggtcatttcccgcgcttccggcaccatgacgtttccgtgccgcttcatgctggcagccgccatgaatccgtgcccctgcggctatctgggcgacaggagaagaacctgcacctgtcccccggcgcaggtcgcacgctaccgccgcaagatttcaggaccgcttctggaccggttcgacttgctgatggaagttcccgccgtggacccctctattctggcctccgcacccgccggggaatgttccgccggcatcagggaacgcgtgatggccgcccggcagctccagtgcagcagatatgcgggcactcccttccgcagcaatgcggcactttccggaaaagcgctccagaggcattgccgcctgctgccggaaagccgcgccatcctgctccgcgccgtggaagaactggccctttccgccagagcctacgaccgcattctgaaggtggcccgcaccatagcggatctggagggcagccctgatattcaggattcccatttgtatgaggccgtgcagtaccgggcctttgaacattctctccgggaatgaaccattccggaatgccgcgttacgccatgccaaagcgtgccttttccgaacggaaaaaggaaaagaggcgtttttcaggtcgcctccttcccgattgaaaagtgtaccgctcaccggttccgggaacgccggaagacgagggctcccaggccaagcattcccagagatgcggtagccggttccggaacggtttcataggatacttggatgttggcaagcgtatagggggaggtggcgccgcccgcgccgccgcgcactccggcaaccagcttgtatccttccccccacgccaggggagaatccgccatgtccagggaaacggtcgtcgttcttgaagtggaatcaaaggtaaagctttccacggtggaaaggttccggaccaacgttccggcggagtcgtaaaccgccagcaccatggtgtagctcgtgatgacggaggtgggcgtgtcacaggaaaagatgatggaggaaacaagctctccctgccgggggccgcccagcaccatggcaaaggagtctccggccacgccgcttctgccgcacaggatgatggaaccgacgtcatcatggttgacccaggttccctccccattctggggccagttggccaggctgttgttattgcctcccgcatagacgccaaattcacggccttttactttatccagcagctggtttcccgtttgcggcgccatggtcgcggtttgcgacagattggctgattcgggcagttcggcaatgatggtagcagcatttgcagccagcacactggcgcaacttattaatacagcacaatatctatttttcataagttacacaccataataaatttattatggtgtgtcaatttacatttaagaagaaaagtctttgaattttcagatttttctgaaatccggcgcatcttcttgaggttgaatggccgagccgttccccgtaattcgccgttgctggatttttctttataaccctattaaaatacctattttacgtggaattaaactttggaataaggagaacatgaaatgaagttatttttctgcggagtttccgcaggtttttacaggagccgggaggcccctgctgccggaaacggtctttccccagcgggagcatatgcctcgccctcccgtttgccggcgctcttttccggaaacattcaatacgccgggccatcccggctttttcacccgtcacccacgcagaacagccgctccgcggacatgcgcggaacggctgttcgcacgagaaaggaaagaccggtttaacggatggcttccagagcctgcttgaggtccgcaatgatgtcttccgcggcttccgttcccacggagaaccggatgaggtccggccggacgcccgcctccatgagctgctcatccgtcaactggcggtgcgtatggctggcgggatggaggacgcaggtgcgggaatccgccacatgggttacgatggcggccagtttcaggctgtccatgaacttgatggcgcgttcacggccacccttgatgccgaaggtcaccacgccgcaggattgcccgttgcggaattgcttccgcgccaggtcatggtatttgttggacggcaggcccggatagttgatccaggccacatcctcctgcccttgcaggaattccgccaccttttgcgcgttttcacagtgccgcggcacgcgcaggtggagggtttccaggcccaggttgagcaggaaggcattctgcggggattgaatggaacccaggtcgcgcatgagctggacggtcgccttggtgatgtaggcgcccttgccgaagctcttgctgtaggaaagcccgtgataggaagggtccggctccgtcaggcccgggaatttgtccctgtgggcttcccagtcaaagttgccgctgtccacgatcacgccgcccaccgccgcggcatggccgtccatgtacttggtggtggagtgggtgacgatatccgccccccattcaaaggggcggcagttgatgggggtggcgaaggtgttgtccacgatcagggggacgccgtgcgcatgggcgatgtccgccattttgcggatgtccagcacgcagagcgtggggttggaaacggtttccgcaaagagggccttcgtattgggacggaaggctttggcgatttcctccgccggggcgtcctggtccacaaaggtgacctcaatgcccattttccggaacgtgacggcaaaaaggttgtacgtgcctccgtaaatggacgcggtgctgacgatgtggtcccccgcctcgcagatgttgaagacggcaaagaaagaggccgcctgtccggaagaggtcagaatggcggccacgccgccttccagttcggcgatttttctggcaaccgcctcattggtagggttctggaggcgcgtatagaagaatccggcttcctccagatcgaacagtttggccatttgttcgctggtttcatacttgaacgtggtgctctggtaaatgggcaatacgcggggttcaccctttctgggggtccagcccgcctgcacgcacagggtttccggtctcaattcctgactcatgatgcagggatgctatgccatgccgcctcccttgtaaagcagggaaaggaggcatttccagccgctccctgcctccccgccttcgcggttacaatcagccgcgttcaagtgccgggaggctcttgttcccaaagacggcctgaggaatatgccaccgtatttggagcttcttccggagaagggaacagcctgcggattttacctgatttccggcagaggggtggaaatttcctcttccgtcaggtagcagccgggatcggacccgtaccagtgcccgttggcaaatgcggcgcgcgtgcggaagccaccgccgcacaaggcaaagtgcacacagcggccgcagcggccttcaatttttttctgccgttccaggggattgtcggacccgcgcaactcaggcagcatctccgccgcggcccccgccttggcgtcccacagatcggaaaacaggttgttcttcacattgcccagcgtgacggattgccagaattggtccgggtgcaccacgccctgcgtgtcaatgttggcgatgccgcggccggagctgttcgccccgccgccgttccattgaagaaggttcagggtttccttcgccagcggggagccttcccggagctggcgcagcagcaggtaaatgccgtccgctggctgggtgacggtcagcacttcacggtttttgccttccgccttccattcctccacgcgggcaatcagcgtatccatggcgttccgcgcttcctcctgcgtcaacgtctgcacttccacgccgcggcccgtgggcaccagatggtagaagcagacgcgctggatgtcattggcgtcaatgaagtccagaatctggtccatgcactgcacgttgttgcgggtcagcgtcaggcgcaggcccgtcttctgccccacttcactgcagagcttgaacccgcgcaccgcctgttcaaaggagcctttcacgccgcggaacttgtcatgaacggcgccgatgccgtccagggaaatgcccacgtacgccacgcccagttccttgaaccgcgcggcggcctccggcgtgatgcgggtgccgttcgtggaaatggtcactttcagcccttttccagtggcccgttccagcagctccatgaagcgcgggtgcaccagcggctccccgccggagaacagcagggcgttcaccttgtagtccgccagatcgtcaatgaccgcgcagcactggtcccaatccagctccccttcaaatttccgggcggaggcgtccgcatagcaatgcacgcacttgaggttgcaggtgcgcgtgatgttccagaccacaatgggcttgcggacgcgggacgaagccggagcgcaggattccacggcgcctcccgcggagcggccgtgcccgtggccctgcccgtatctcaaatggtccgcgggctgttccgcccctgtccaaagtctggtaatgttaatcatggtgttgtgaaagcctgggctggtaggggcagaggttgtcttccgccatcatgtctccgtaaacggcataggcgcgggaacgggagccgccgcagacggtgcggtactcgcaccggccgcatttgccttccagtgcattgtcatcccggagtttgaggaaaagggggtgcgtgcggtagatttcccccggatcatccgtccgcacgtttcccgccgtaacgggcaggaatccggaaggctggatttccccggtatgggagatgaacatgatgcccttgccgtcccgggtgggaacggcgcggcgcgcgggcttgctcccctgcgcgcgggcttcctgaagcgccacgcggcggtaatggtgcccttccgtggtcttgacgccgaaggggacttcacggcttaccttgctgagtttttcccaaacggcctccacttcttccgccgtgggcatttcatccatggcggcccggcccgtaggcaccagcaggaacacgctccacatgcccggctgcatcttcttcatcagctccacaaagtcgtcaaactcgcccagggtgctcttggtgatggtggtgttgatttgcaggtgcatccccgcttccttcgccatttccgccgcgcgcagggtccgttcatacgtgtggggaacgccgcggaaggcgtcatgggtggcctcatgcgccccgtccaggctcagggacatgctttgaacccccgcctccttcaaggcatggaagtccgcatgcagcagccgggcggtagcggcggggctcaatgccacatgcagccccttgccggccgccgcgcggatcaattccagaatgtccggcctcatgacggggtccccgcccgtcagcaccagcatgggagggcgcagctccgccaattggtcaatcaggcgcagggcttcctcatgggtcagttcatcaggatggggccgcggctgggctacggcgcggcaatgcttgcacgccagcgcgcaggcgcgcgtcacttcccagaaaaccaggaaggggcgttcattgagatctgtttcactaaaaatcggtcgcattcctcaggacagccactttagaacaattataatttttgaccagtccaaaagaggggcattcccccaaaaagttcacttggccgcctcttcacggattttctgaacttccttgggcagttcggaaagggaattgagggcctccttcaaattcctggaggcatccggagagagcatgatggccgtcacatgcttgacgatgggctgcatcatttccacaagctgctgctgcactcccgtcagcttggcctgctggttgcgggtgaggggcggcagggcggcctgtttcttggcgatgtccagcagggcggcccggtaatgccctatctggtccacagcggccttgctggtttcctcatccttcaccctggacagggattcatccaggtttttgacttcatccacggtttttgccagcagggtttcatgcgtgttgccctccgcatccttcgggaacggctccgcctgcgcggccttgtcccgggaagcctgcgccagttccgtctgcacggactgcaaatccatcagggccttctgcaaatcgggcgtgagcagaccttcctttttcaagcgcgcaagggatttcaccaattcaccggaaattttctgcacttccgtcatctgggcggaaatctgcgcctgctcctgcggcgtggcgccgggaagttcaagctgcctttttccgaggtccaccagcttttcacgcacctttttgaccgttttcacggcgtccgccgctccgggctcgtccgtcaccttgtccagcgccgccgtaatttcatgcatgctggcaacgctctccttggtcagggaaagatgggtgtcctgggcaaatgcgggggccgtcatgcagacggcagcgcccaggccgatgaaagcaactgttttattcatgatatggaagccgtttcgtcacggaaagatacttcttccttcatctcccgtcaatcgtgacggtcgtcacgaaggacaaccccttcttttctacatacggtcagtggcaggcaagcactctttcatgcctttgtaaaagccatttccccgcttgggcagggctctcttttcacctgcaaacgctacagagatgatagggactcaaccactaattaatacgatatggctcaattaacaatacaacaatttctaggatacaaccccgacgatagaggtcgcttcatcgatcatatggcccggttcggacaacacgttgataccgttctcggcagtgtcgccaggactgattacccctgggatattcccggcggctgggagggctggttccaggttgaatttgccacgtacctcaccatgaacaatattgatcatgaacgggaaaacggtatccagggatacggaacgcctgatttccttttttcaaatggcccttatcttgcccccattgaaatcaaatgccatcatccgggcagcaatattacgcaagatgcattagcggatgtggctaaactacaacaatccgggatgaattccggactcgtcatcgctgttactcccagtggaccacccaatgggagtttccaccatgcccatacccttaccggaaccgtgggtggagtcaatcctcccaatatggaaatttactactgcgggcaataaggctttaccacattaaaaagggctgtctgctccattgcagacagcccttttgaaatttttaacagccggattttagtcgcgctgctggcgggagtacttgtagtagctctggaagctgagttccgcagggaattcgctcaggccgccgttgggattgtattccttaaggccgctcatgccgcaacgtccctgataggggggcttgtacgtgcacttgtaggtgggagcccagaacgtgacaagttcatagatgccgtagcccatgcgttcaagcatggtggcggtgccatcaacaatgcccacggaaaaaccggcatagtcaccttcgcggctcgtccagttgatgattcccaggggaatttcttcaacggagtaaatgatgttggcgatggcgcggcccagcttgcgggtgggggtgtattcggaagcgggtggagcctgaatgtccgcactggcgacaccgatggcgccggcggcaaaaagagctgagatgatggcacgtttcatactgattgtttatatagtataatttgtcgagggaaagcaactcaaaaaaacaaaaaatcaatctaattccgggcgggggtcccgcgtcatgagctccacaagcgcttccatgggcggcttggattcataaagaacggaatagacggcgtcaatcagcggcgtcctcactcccagcttccgcgcaatttcatagacggagagcgtgttgggcaccccttccgccaccatgcccagggcgtccagaatttcctggaggctttttccttccgccagcctccgccccaccgtctggttgcgggagtggcgggaatagcaggtgacgatgagatcgcccacgccggaaaggcccatgaaggtttccctgcggcctccgctggctacgccgatgcgcgtcatttccgccaggccgcgggtcagcagggcggcctgggcgttatctcccaggttcagcccctcgcacagtccggccccgatggcaaagacgttcttgatggttccccccagctgcatgccgatgatgtccgtagcggaataaacgcggaaggtcttggaggcgaatatctgctgcacccagtccgcatatttcggatcctcaaacccgatcagggaggcggacgggaggcccaggcagatgtcttccgcatggttggggccggagagcacgcctatgggattggagggcagatattcctgaaggatttccgtcattcttttatgggagccctgttcaatgcccttggtgcaggagacgatgacggcgtccggcctcaccggcaggtcacgcagccgctgcgctacggaacgcatggctacggaaggcaccaccaccacgatgagctccgcgtccttcacctggtccaggtcgcaagtgggatggatgttgggggccaggggcgcggcggtttccgacaggaccgggctgcgcctggtttcagcaagctgccgggcctgcgcttcttccggcgtccacaggacgacttcacattcccgggtcgccaggaccatggagagggccgtaccccaggaaccggcgccgatgactgctattttatgtaaccgattcatcatcttacttggactttttggaatagaaggagtgttccgttccgttgaggagcctcacgatgttggaacggtgcttgagaatgaccagagcccccaccaccgtgaaaaaggcaatgtaaagtatctggggagaaacggccccgccctggcaaagcgggtagaaccaccatccggcggcgatcatcgccacggcagccaccaggctggccagcgacacgatgccggagattcccatgaataccagccacgcgcccagggccacgcaggccaccaccggattgagggcaaacaagacgcccgcagtcgtcgccacgccctttccgcccctgaacccaaggaaacaggtataggtatggccgagcaccacggcgaaacagacgaggacgactacggcgttgaagtcccagccgcccgcatcccccgtcaggaacggcagccagttcagggcgccgaacacgggcacgaacccctttaaaaaatccagcgcaaaaacggagaggccccacttccagcccagcacgcgccatgcattggtagcgcctatgttgcaggaaccctcccgcctcaggtcaaggcccctgatcctgccggcaaggtagccgaacggaaccgctccaaccaggtaggaggctgcaatatagagaactatccaggcaatcatgtcgtgcggagggtattctacccccccgcccgtcaaatgacaatggggaaatcgtctccgggacgcttctttccggcggcctgctcccgcggaacagcggaacgttcaacggccttccccggcaccggatttccagaaggcttcctgcaccgcccccgtccggaggaaaggccctcttttaaaaagcgacgcagtaaaaacggcacaggctcgccccgcgctcgtggggaagatgcccccggtcttatttttccttttccggaacgggtttatttaccgtccgtgcagggtttccgcatcacggcggcccagacggaggcattgtcctgctgcggttccagcatgtccttcacctgctccatgatggttcccaccagctcccggctggaacagtccctggccttttggagagccaggaaagaaggctccctcagcagttcgctccagacctgcaagccgtccgagcaggccagcaccgcatcccccggatgcagaagcaggggcatggcgctgatgtccaccagttccatgggcccccccatgacggcggaccgcagaacgcagcgctggcgcagagcgccctggagggacatttcccccttccggtagaggcaatccgcaatgggcctcatggagtggtcttcattcaggcggtccatgcggaagctgtccgctccgctccataagtaaagggggaatcccccacgctgatccaccacagggaacggtcacggatgaagacggccagcagcgtggttccggattcctccggctccttctggatggcggccagcgcccggttggcggcatgcagggcttccgtcagacgctccggaatatcctccacgccgctttccgcaaatactgcggcaaattcctgcgccaccacgcaggaggcgcagtctccgcggagatggccccccatgccgtcgcacacgatgcccagcatcccgccggcggcgggaaggcttttaaccacgtcttcctgctcacggcgtttgccgatccattgggcggaagcgcagtccagggtatccggggtggggggggccatgcggctggggggctgaattaactgtccttccgtttcagttgcgggaagagcaggacgtcgcggatggaagaggcgcccgtcagcatcatgatgacgcggtcaatgccgatgccgatgccgcctgcggagggcatgccgtattccagcgtttcaatgaagtcgtagtccacgcgctgggtttccccggcggcctggtgttccaggcgctctttctgcacgtccggatcgttcagctccgagtaaccggggaaatttcctgcccgttgattaccagttcatacacgtccaccacgtccgggttttctttgttcagcttggcgaggggaaccaggtccttggccacatgggtgacgaagcagggattcatggttttttcctccaccagcttttcataaacctgctgggaaacgtccacatccttcatgtccgggctgatttccacatccagctcctcacagcgggcgcggcgcgcctcgggagaaatgtcaaaccagtcctgcccggccacggcgcggatcaggtcctggtagtcggcgcgcttccaggggcggctgaggtcgatcgtgtaaagcacgttgccttctgcatccttgtggtctatctggaggcctccgcagaatttttccgccaggtggcagatgagttcttccaccatgttcgccatggtttcaaaatccccgcaggcgcagtaggcttccagcatcgtgaattccggattgtggcggcggtcgatgccttcattacggaagctgcggttgagttcaaaaatcttggtgaagccgcctaccatcagtcgcttgaggaagagttccggagcaatgcgcagcgtcagcggcatgtccagcgcgttatggtacgtttcaaacggcttggcggcggcgcccccggccacgtcctgaagcatgggggtttccacttccagatagccgcgttcctggagaaagcggcggatttccgcaatcatgagggagcgcgtgacgaacagggacgcgctttcctcattggaaatgaggtccagatggcgcttgcggtaggtgacctccttgtccgccaggccatgccatttgtccggcaggggacggaggctcttggaaagaatggtcaggccggagaccttcacggtgggttctccggtacgggtcaggaaggtggttccttcaatgccgatccagtctccgcggtccaggagcttccacagcttccaggtggtttcatccacttcattcctgtgcaggaacccctggattttgccacgtacgtctccaatgacgaaaaactgggatttgcccatgtcgcgaatagccagcaggcggccggccacggctacctgtttgtcttcctggaaatcggctttcaatccggcgggggtggtggtcacgtcaaatcttgcgccgtagggatcaatccccagctcgcggattttggcgagcttgtcgcggcgcacggcaataagttcggattccgtcgtattcggatgtgcctgctgttgttcggacatagtgcggggattttaaaggcttgcctccgttttggctagtgcattgtcaggcagggggcatttttggcggcctgtccggaaccggggacctttttgccctcctttccggagtccaagcgccgggggacgcacccgcgggggtggatgcccgtccgcagcctctgtaaaaaggagcgggagaaccacgcaaggcacgatattcaaaggaattgaaaagaaactggtcttattattaaaaaatagccgccaaaaccccacatacgcataattgcttttaccttcggcgtcagacatgttataaataactccgttaaggcgcaccttatttatcaattatatactatccgtgcagacttatgagtgatcagacaaccgtaacttacagcacgattgacgctaacgaagccgtagcctccgtagcctatcgtttttctgaagtcattgccatttaccccattacaccgtcctctccgatgggtgaatcagccgaaagctgggccgctgtcaaccggaagaacctgtggggcaccgttccctccgtggtggaaatgcagagtgaaggcggcgcggcaggcaccgttcacggcgccctccagaccggagccatggcaactaccttcaccgcatcccagggcctcctgctgatgatcccgaacatgttcaagatcgcaggggaactgactccggccgtgttccatgtggccgcccgttccctggcctaccagggcctctccattttcggcgaccacagcgacgtgatgagcgcccgctcctgcggctgggccatgctgtgcggctcctccacgcaggaagccgcggattttgccgccatttcccacgccgccacgctggaatcccgcgttccgttcatgaacttctttgacggcttccgcacgtcccatgaaatcggcaagattgcagatatcacggacgatacgctgaacggcatgatcaagcaggaatgggcggactccttccgcgaacgcgccctgacgcctgacgctcccgtgctgcgcggcaccgcccagaacccggacgtttacttccagggccgtgaaacggtcaaccaattctatgaagccacccccgccatcgtgcagaaggccatggacaggtttgcggacctcacgggccgttcctaccatctggtggactactccggcgccccggacgcagaacgcgtgatcatcctgatgggttccggcgcggaagccgtggaagaaacggtggaagccatgatcgcccgtgaaaacgccaaggtgggcgtgctcaaggtgcgcctgttccgccccttccccgccgcggaactgatcaaggcgctccccgccacggtcaggaagatcgccgtgctggaccgcaccaaggaacccggctcccagggcgaaccgctccaccaggacgtcatccaggccctctttgacgcccaaggctccggcacgctccccttcaccaacggcatgcccaaggtggtaggcggccgctacggcctctcctccaaggaattcactcctgccatggtcaagggcgtctatgacagcctggaacaggacgctcccaagaaccacttcaccatcggcatcaacgacgacgtgctgggcaccagccttccgtatgatgaagattactccacggaagcggacgacgtgacgcgcgccatgttcttcggcctcggttccgacggtaccgtgggcgccaacaaggacgccatcaagatcatcggccagcacacggacctgtacgttcagggctacttcgtgtacgactccaagaaggccggttcctccaccatctcccacctgcgcttcggcccgcgcccgatcaagtccacgtacctgatcaccaaggcgaacttcctggcgctgcaccagcccacgctgctgaacctgtttgacttcctgaagaacgccgccaacggcgccaccttcctgatgaacagcccgcaccccgcggacaagctgtgggacacgctgcccgcccgcatgcagcagcagattctggacaagaacctcaagctttacacgattgacgccttctccgtggcccggaaaacgggcatgggcggccgcatcaacatgatcatgcagacctgcttcttcaagctggccggcgtgattcccgctgatgaagccatcggctacatcaagaaagccatcgccaagacctacgccaagaagggccaggaagtggtggacaagaacatcgccgccgtggacgccacgctggaaaacctccaccaggtggacaccaccggcaagaccatcaccggccatgccattccgcccgtcatgtccgctgacgctccggactacgtccagaacgtcctcggcaagatgatgtgcggcgaaggggacagcatccccgtcagccagatgcccgtggacggcacgttcccgaacggcacttcccagtacgaaaagcgcaacctggccctggacctcccggaatgggatcccgccctctgcatccagtgcggcaagtgcacggccgtttgcccgcacgccgccatccgcagcaagttcttctctccggacgccctctccggcgcgccggaaggctttgaatgcctggatgccaagcatccggactggaagggtgaaaaattcgtcatccaggtctccccgaacgactgcacgggctgcacgctctgctccgacgtctgcccggccaagagcaagacggaccccacccacaaggccctgaccatggtgcccaccctgaagattcacgacaaggaggaagccaactgggacttcttcatgagccttccggacgtggaccgcaccaaggtaaggacggacaacatccgctccatgcaggtgctgcgcccgctgtttgaattctccggcgcctgcgccggctgcggtgaaaccccgtacgtgaaaatgctctcccagctcttcggcaaccggctggtggtcgccaacgctacgggctgctcctccatctacggcggcaacctgcccaccaccccgtggtcccatgactccgaagggcgcggaccggcctggtccaactccctgtttgaagacaacgccgaattcggccttggcttccgcgtctccctggacaagcagatggaacacgccattgagctcctccatgaagccgccggcatcgtgggccaggaactggtggaccagatcctgaccaacccgcagaaggatgaggcggacatcgcgcagcagcgtgaaaacgtcgccgaactcaagaagagaatcactggcaagccggaatgtgcacgcctcctgaccatggcggacaaactcgtccgcaagagcgtctggatcctcggcggcgacggctgggcctacgacatcggctacggcggcctggaccacatcctggccagcggcaggaacgtgaaggtgctggtcatggatacggaagtgtactccaacaccggcggccagtgctccaagtccaccccgcgcgctgccgtggccaagttcgccacgaccggcaagcccggcgtgaaaaaggacctgggcctcatggccatgacctacgggaacgtgtacgtggcttccgtcgccctcggcgcgaaggacgaacatacgctgaaagcctttgtggaagcggaagcctatgacggccccgccatcatcatcgcctactcccactgcatctctcacggcatcaacatggccaagggcctgcagcagcagaaggcatgggtggattccggccgcatcctgctctaccgctacaatccggacctggccctccagggcaagaatccgctgatcgtggaaggcaagggaccgaagggcgaccttcgcgacgtgcttctcagcgaaaaccgcttcaagcttctggcgaagaccaacaaggaaggatttgaaaaactccttgaagaagcccagaaggacgtctggcaccgctggaacctgtaccagagcattgccaacatgggcgccgacaagtccgcggaataaagcgtacagccgctgaatttcaacgcccctgcacggttcgtccggcaggggcgtttttattcattcaacaggagagagctcttttctgcgcgccggatacgggcgccttccgcgcaggttcacagaacccttttcttccacagcttcagtcccacggcatgtccggccacaagacccgcgcaggccgccaggcatccgagcgcgtccgtccacagccacccgttcttccagtcccggaacagcagcaggtgcaccgcctgccccgcggtgacagccgcgagaaaccacgccagaaagtagccgcagctccatgcgccacggaacagcagaaaccttttcagggaaggtctttcacatctgcggcctttccacggatttccgcactggatgaaaatcatcaccagctggaaacagaagcaccccgcaaacagcagggaatccatgatcaaataccccttcgcggaaaagcaatgagcagcgtccggctccacccccggaacgatggatgacagcagaaacaacgcaagcaaaacaatatttccgtacatgggacttgtctgaatgcatcaagcataggtgcagcctttcctccccgcaagaaataaaccaatcccggcatgctatccgccgggaagaaaaacggtcccaggcatctccttccccaggcgcggcccgcgtgaaggaagaacgctcccggagcaggaatactgctcaggactcctggaaatggtgcatgccggaggaagaacataccattccggaagccgtatccgggaagtgcaccacatcgggcatgaagcgggtaccgacatccggagagagcgcatccccttcttcagattcttttcaccctccggagtacgcacggcggcatggtccctgatgatgtaaaatacttcttcacttacttcatgataacggtggccgcaggcaaactgcaccggttgcactgccacgaacccgggcgcgcatttgcgcttcatggaagaaaatggcctgcttacgtggaaagtacatgcggaagtacctcttaactctgtgcgcggaatgtacccattctggccccatgtccccgctggggaaagcctatcagcaaatgaacacgccaagcccgcagatcaaggacatttctgttttacggttcttccccgcccatgggactgcccggcggcgttttatcatctttcaatgcggtttcagccggagattggaataagggacaattttttaccccttggggattcttcacgttaagaaacgcatccatagcctgcacggcttctttctgattccatttccgggattgctcaagggcaggaccggaaattttcctccattctttttccgcctcttttaaagaaaccgccttaaaacatttccactggggagcatcctgtgtaagaagttcaaagagggacacaacccaaaccgtttcagagggcatgtcctctgccaatttttcctgttcaggtgatgcaggcgattttgtcttttcttttactattgtttcaaacggatcttcaccctcggtttcctgggaaagaggcacccggcggctgcctggggaaagggagcatgtttccttaatgacgcccgtatttacataaacgctttccgtctgctccatgccgcttttccagcgggttccatctttgggattggtctcttcacagccgctccattccaataccctgccatactgttccgtcagttcccattgcttccatccatagataaagcgatacctgttaacatacctgtcaggacaaaaataataagcttcttcaccacgaaaaacactgccgattttcttcccgtgcaggcagaaggaaggaaccgtataaagataagagttatccgcattgcagataaaccttacatgttcatcctgcgggggaggagttccagctatttcagggttccggtacaggaaaattctttcttttccatggtctcccacaagatcaatttcctgcataaaaacaaggccgccgttggggccgtctgaattctttaatgcaggattccagcccgtccatgattcaataagatcgccctgtccggaaacctgtttgcgaatattccactggagaaaagaaggaagctgggaaaaatgaagggaaaaaacaggcggctgctctgccgcctttaacaaggcggcagagcagcataaaaagcataatcctgtgattaaagcattcattctaaatttgatttaccctggacagaaccctgtccacataatcaaaattattgctattatatctggaaatgcaccattgtctagaagtattcatccaggcgcagtagtggccgctttttccgggatcataaagaaaaccgggggagcgcaccttggtgccgggttcgttaatctgccgggaacatttggaagctccgttatatgccttaagcgtgcaaagctgggcgatggtacaggccgttccttccgcaaatgaataatcatacggaaccccctggcctggattggtatcggccgcacgataaaccgggagagcactttcaggcgcttccgcctgctgctgctggagttgacggagcatccacctgtgcgcctcattgtatttgacaaggatgatttgaagggctgcctggatgtttttctgccagttccatatttgctcccttgggatggcggtatatatgccgtctccccctgccgttcccgtcacttgaaaaatgccgtaaccgccggcgccggcggtatcctggctatgaagcggaattccttccgccccgggctccctccggtacttgccgcctccggccaaaaattgattgtacaaggatgacggggcattactccaggagaaggggtaataaaccgcctcgccgccatatccaaatgattcgcttttgcctacggcgggaagacaccattccatggaggccaaagtatccggatacatttgaagcacgtaggactgaatataccgggtgcacatttgatcgtccggattctgccctccgatgcggaaacgatagatatccgctcctgtataggaggagtggccgtttttggatttaatttcaaattccagactggcatttcctccaaaaaagccttcattcacctcttcaagccaatccgtatcctccgcaatattccataaggacactggctgttctttccaattttcctgaatggaagggatatgtactgtatctttatccaaaacggcccggttgcgatcccgggttccggcaggggcatctgcatattggatcgccgggcggctgtagcttaccgtcagcctggttttccaggaaaaacgcccggcatccaacccttttatttcaaaatgcaaactgggcattctaggactgctttcctggccggaacctgtctctgcataatcaatccatgcaatcgtgtcagtattcctgccgtccacatatcccagcgcatcggaatgatcatcttcctgcggtacgaccaatctttccgatactccaaacagcggagccggaaaagccttcaaggtgacgggatgaatatccacttccgtaatcagagttccaaaagttccgccttcctcacattccatggagagccatatgtcctcccttcccgtattgaattcctgggaacgcttgaggcgcatcagcaagcatctgtctctccattcccccgggataatttcaccctccttgacattcaacgaggcgattacttctccggtattctgcgacgggtctcccagcgtgactttaacatggtaactattgttaaccttgttgccatcatcaccgcgcctgccccggtccttccacgaaattacataaaatcccgcggcataatccggagtgtcaaacgagtccctgtcttcaaagaacatgatcctttgtttgatgcctccggaagttttgtcagaatccagctctgcacatgtaacatgatcactttctacggaccagtattctatttttgttccgcggagggcataccatttccggattctggaagcacggtcggaagttccttccgtggaagaaatgaatccatatttaaattcgacgccttccgcatatccctgatcgtgtttctgatttaatgctcccgttgaacccatcttcccgttttcaatctttatttcatgccgggaatcaccgttatttattgaaattgcgttattcattgcatttagtatttttatggaatgccatcgtaaatatcggttttttgggattcaaccattacttgacgaattaaacacggacgatacgtgcctctactccctcctgttgaaaataagcaaattccataaatgctgccactacgggcggaaagtccaaaggactacccaaactgctcgctcccagaggcggaagaacaataaataaagcttgcccgttgtcccccagcaacctgaaagacaaggacaagctttttataaaaataaagaatcgaaaacgcggaagctataaaatcatctagcggcttccgccgttttacggatgatttcacgggccttgcgcacgtcgtcctcatgggaatcgccgcggcttctttccacggtgaagagcttggaaagctcctcatccatgcgggccacggcggctttcgccttcgggttcttcgcggcgcgggcgcgcaggatattgaccttttcaaattcttccagcccgtctcggagtttttcaaaccgcagggaactgaggttgccgggataaaccaggtagcagtctcccgcgggccagttgccgaagtccgtcttttcaaacggattgcggttccaggagttgtaggcccacctcaaaaagccgtccagatggttggcggcggcaaagaggggcagccattccgcctccgccagcggggagatggtaaaggtgttgggctttttgggatggacgcaaacatagaacgtcgtcttcttcccctctttcttgcgctgcgccaggagatcgcccgtgaccgtgtccgcatggtcgagcacgggagagacgtcatacacgtcccgggtcatggcggtaggccggttgacggcggagacgatcttgaattccggagcatacttgtccagcacgttcttggccgcctttaccatggagtccggccgttcatccagcccgatgcaggtcttgtccagccatcccttgctcttgacatgcttgcggaaatccgtcaggaaaggcccccagatggcttcgtaggaagggtcgttcggcttgaggtccaggaacttgtattttccggtagcttcatccagataacggactttcatgttccacggaatcatggtgtagcaggatatctggcccttgacgcccacctcgttgatcatgaaggaaacccatttgtcaaagttggcgtagttccagcgcatggttccgttcttgcccttgatccattcgatcatgggggggaaccagtcgtaggtctgggcgttccaggcttcatcaatcagggagcaggtaatggccttctgcccggcatccgccagcctcttcatcaccggcttcatcagcgcgaaatgttccggagaccacggttccacatcatgccagcgcgccacagcctgcggatgctgccaaaggtccaggtgaacctgccaattggcgggcgcaggcagagattccggagccacttccagaactacgggaacgctcacgggagagccgctttccgcggaaaccactatttttcccttgtacacgccgggtttggcggacgggggaatgttaacttccacccagacgggacgcacgcccccggcctgcaggtcacagctgttttcactgccgatgatatctgaaatgagcctgttgcctcccttggtgtagcgtatcatggaggtccggacgggaatgacctgtccggcagcattttttaccccggcgcaggtagcggataactggggctgcgcctgggaagaccagacggcaatctgtccggcggcgcgttcgcccctccagccggacaggcgcacggaatcctgaagcatttcctgcctgggagcgccgctgtaagggatgcggtcataatccttcaccgccgcggcttgcaggttcagggcggcatcagggccgtagcccttgatttccaccaggtgccctcccttgtcattgccggcgttgttgcccaggaaggtgattttgacgtaccggaccgtctggggattgaatttgaaggggacgccttccgaggtggccgcaatgctgttggaagactggtccgccagcattttccaatttttgccgtcttccgagccttctattttatacttgtaaatgcggcccccctcccaatatggccagacatgcagggcggaaagcgcgcggggcttccccatgtctatctgaagccagacgggaatgccctcacatccccagtatttgcctgcgttgttcgcctggccgtccacggccagttccggacggtcgttgccgtaatgcccggaagcggtgactttggccccggcaaacaggttgcccgcatcacccgtcgctccggcggaaaccagggcgggttcatatagcgggtgcctgtccggcgactgggcctgaacaaaagacgttaaggcaataacggaacacagaggaaaaagaaaacggcgcatgcgtatattacgtgcaggaattccgttttctctcaagaaaaaagagtgtttccgctattccgccaaaggacgcaccggaatgcccctggaggcaaagtaggttttggcttccggcaccgtgtattcgccgaagtggaagatggaagccgccagcacggcgtccgccttgccctccaccagcacgtccaccatgtggtccaggctgcccgctcctccgctggcgatcacgggaatgcgcaccgcctcgctgacggcgcgggtcagttcaatatcgtacccggttttggccccgtccgcatccatgctggtcagcaggatttccccggcaccgcggcgttccgcctccacggcccattccacggcatccagccccacgaatttacggccgccatgagtggaaacgccccatttgccgggcgcctgcctcttggcgtcaatggctacgacgatgcactggctgccgaaggccgccgcgccttcattgatcagttccggacggttgatggccgccgtattcagggacaccttgtccgcgcccgccagaagcatttcacgcatgtccattacggaacggatgcctcctcccacggtcagcggcatgaagcagcaggccgccgtgcggcgcaccacgtccaccatggtggcgcggccgtcggaagaagcggtgatgtccagaaaaacaagctcgtccgcctgctgggcatcatatgccctggcgcattccaccgggtcaccggcatccctcaggttgacgaaattggtccccttgacgactctgccgtccgttacgtccagacatggaatgattctttttgccagcacggccttatcaagccatcaccgccagcaaagggaaagcctaaaatacggcttgccgcaggatgcctatgatgggaaaaaacgtctctttcctataaatatcccgttgcaagctttctttgtcatctccatcaaatttgaagacaattccttgaatttcaataaatggataaatgtatagaaagcattttacacacgctttcctcctcctgttcaataaatgtctgcggattaagaatccgcaaacaataaaaaatgttaacaattaatttactgtacattttaatacattgaaaatactatcattatagtattcctggtcttttttgaattcatcctttccatacttgctccgcaagttatacaaaatttgtatttcacataaaaaaaccggattcttaatccggtaaacgggtggaaatacttccttccagtatttttgactcaaaagtttaataaaatgaagaaaacactttctcttctggccgtcacgctcctcggcatttccggcggccacgccgccgtcaccctggtttccggattttcccggtttgaccagacttcaccggacagcggcaccgctgtttctgacctgggaacgaagtccctcagctggacgcttaacgacgctatctggaataacgacggaacatggacgtccaatgcgaccaattcaaagaaaaacgggcttaatgtttcttcccttcagctttccggagctgccggctatacggtgaacattaacttctccagcgccgccagcctggacaacacggattccctcttctgcgcttccattggcggaaccggtcttaattccattgtaggacgctatgaaagcggcaagataggcatcgccaacaatggcggcagctcgggacgtcccgcaagcggcttaagcagcaccgccattgacttcaacagcccgttttcactgactctctccgttcaggcagggggagcctacagcgtgttcattacgcagaacggcaccactcaaaccgtatcctggcccaacatggcccaagccggaaatctggaccagctctatatcggctgctgggcaaccttgaacgggaaccagagttccccgacggtatccggcctcagcttctgggaaggcgcggcaacgcaggatgacctggcagccatcatcaacgttccggaaccggccactgcctccctgagccttctggggctgggcgcactgctcctgcgccgccggagaaagtaaaatttcctcctgtcgggccgctggcggtttcatgcagccagcggcttttgttttttatccctttgaatccaactgccatgaaattttcatcactttaccgcagtctgctgttcatccccataacggcggctttcatcggcgcggcagaagccaagacgcttcaattatacatcctgacaggacaatccaattccctgggagccgtcaaggggtctccggcgtccgcggagctgctggaacagtacaggtccgatggaagcaccaaattctggcacaataatttcaacaagatcaccggcagttccgtagactgcaatccgccagcttcctcttcctggggttctgtcgtaccccaggtgtgcggaacggagtcaagcaattacaactgcatggggccggagtacggctttgccgccatgatggagcgcaagggatggtccctgggcggccctggctccggacatgcggacatgggaatcgtcaaggctactctggacggaggaggcaattcctattggaacaaaggcacgaacgcctataatgccatagtggagaccgtcaggaaggcttgtgaaaacgccctggccaacggttacgacaaggtggagatcatgggcgtaatgtaccttcagggagagtccaatacagtcactgacagcagtaatgccgccaattcatttttaacgtttctggacaacttgcagggggaccttgcccgggatggagtggacaccggccctctggcggcacatcaggccattctgggagaacaggccaagtggggcacaaccaacgtcacgaatgctgaaacgggggacgtcaccggaggattcaacggcaatgaaggttcttccggaacaacccgcgaccagcaggaagccctggcccgggcaaacgacaacatgggctgggttccgacacgggacctcgccaaaatcacctccggcgacaacatgggcgtccattacgacggaaagtcccagatcaccatcggagcgcggtatccctatgaggcggccaggctggccgggtacgatacgggtacggtccgcagcggaaattacgacgccgctctctcttccacggaagcctggatgaacggcaagctccccgtggacagcacggccgtctgggacgcagcctcctccgccaaggataacatggtgagttccgccgccggaaccaacgccgtgctttacggcatcaggattgaagatacatacctgaacaccatcaccatccggggcgtggccgttgacggcagttccgctccctccatgcaggacggccatttgatcctggggagcggcggcatcgacatcgcaaccggaaaaaacctgaacatcgcttccgtgctggagcttcagggcgaccagcaatggaaccttgcgggaagaagcaccctgtccatccgggggagcagttcttccggcaaccatcagctcacgttcatcacgggaacgggagacgtcgccatccgcaattccacccttgcggctgatccctccggaatcgccagagtggaggtcagcgcctacgtcaatacggatgccgccgcttttacgggaaactggaccgtcggtccgggagtggaagtaacaatgaacggcacggataccaagaccgccggctccggctggggaacgggctccgtcacgctccagggggcaaccgtccttgccggctgggaacacgtgacgtccaatacgtggagcaaccgtttcattctggaggaaggcaccgtttcctccttcgggagctccaccaacgccaccggaaaagtcctgaccctgtccggcgggatttccggaaatggggccttgtccaagaccaccggcaatacgctggttctggcccatgccaatacctatgcgggaggcacccaaatccggggaggcactttgcggctcggagacaaaagcgccctgggcacgggaacggcggccgttcacacgggaggaacgctggatttgaaccgttatgacgtttccaacaccatccgcctgtccggaggggaggtgctgaactggggcaccgttgcgcgcgtggaaatcggccaccaggtggtctgggcggaccagcacctggaaggaacactcgccttgtccaacggctcccgcatcctggccggcaattccatgacgctgggaacgggcgacagcctggcggcggggaattttaccgtggagctttcatccatgaacctggtggaaggaggcgaagggctggcctccatcatcatgacgggaggcgtcttgaacctgctggacggcctgactctggacgtcagcggcatccttgctcgctccggcaccatgtccttcaggattacggatatttcagggggtactctggaagggctttcctccgcggaagatttttccctggcagaggccgcccatggctggaatgtgctggattacgacgcttccacgggaatcgtgacgctttccgtgcccgaaccgtcctgtgccctgctggggctcctgggcatggcggctctgctggcaatgcgccgcagggcctgacttttccccctgctcccgaagccagcaggagcgccgccagcctttgcggcgctccgtgaccggacctgaacagcccggggatttaactggaagttatgccttcctcctcccagccgcctttcctctgcgcgcgttggaaataaccggagtaaacagggcgaaatggggcaaacggcttaatagcttttctttccatgtccaggtgctagactccgcgcaaggcatctccacccatgacaaccacacgctcgggatttaccaaacttgcagctatctgcattgccatccttctgggggccgtcatctgggagctggggtggcccctgacgcatgcggagcatgaatggtcgcgcctgattgcggccgtcgccacgctgggccatttgacgggcgtgctgggctccttcttccggaaggagatcaaccgcccttccctgaggctgctgattttccagattatctgctgcctgctgatcttcctgctgatcgccagggagcagcaggaggacagttacatgaggtttacggagctttcccgcctggtgattacggcagggctgatcgccatccccacgctgatgtccctgaccaggatttttgaatggctgctgggcaagcagaaaaaagggcgcccgctgatggctcccgccatgcagttcgtaacctccctgggagtggtcatcctggcgggcaccgggctgcttctgctccccaattccacgtatccgggcatcacgctgagctttacggacgccctgttcaccagcaccagcgccgtgtgcgtcaccggtctgaacgccgtggacttcgccaacaccttcaccccgctgggggaaatgttcacgcttgccctcatccagatcggcgggttcggcatcatgacgttcgcctacttcgtggccatggtggcgggccagggcttttccctgcgggaccgcgtgcttctgacggacctgctggacgaagggaacctggggtccgtggtctccttcatcaccaccatcgtagtcagcacgctgttcattgaactgtgcggggccgtcctcctgtacttttcctgggaaggaaaggatatcaacctgatgggggaacccctgtggtggcactccctcttccactccgtttccgccttctgcaacgcgggtttttccacgttcccgatgaatctgatggagccgggcatccgcctgtgctacagcgggcaggccgtcatcatggcgctgatcgtatgcggcggcctgggattcggcatttacaaggaaatcaactcccgcctggtcaaccgctttctggccaagcaccgccgcctgcgcatgcagtggaccccgtatttcaaactggtgatgatcgccacgggcattctgctggctgggggcgccctgtccatttttgccgtttccgccccccacacttccgaaccgctggggcagcacctctggagctgcctttttgacagcgtcacggcccgcacggcgggattcaatatcagcgactacagccgctacctgcccgcggccagcctcatcatgtgcggcctgatggtggtgggcggcagccccggcggcacggcgggcggcatgagaaccaccacctgcgccattgcgggcgcggaaatcctgcgcatcctccgcggccgggaccacgtggaattcttccaccgccgcattgaccagcgcaccgtggcgcggtgcgtgatcacggtggtggtctcctgcgcctggatcggctgtttcaccattcttatttgcagcctggagcccgccatgagctcactggatatcttctttgaaaactgcagcgcttttgctacggtaggcgtgtcgcggggaatcacgcccaatctgagcgacccttccaagtatcttctcatcatcaacatgctcgccggccgcgtggggcttttcgccttcctcatcgcgctggccggcacccctaccccgcggcattaccgctatccatccgtcaaaattccgttaacctgaacataccatcatgagatataccgttatcggcctgggccagtttggacaggagctctgcacggagctttccgcccgcaacattgaagtagtggccgtcgcctccacggatgaagaactggagcagatcaaggacctggtgacttacgccgtggtgacggattataccaatccggccgccctgcgggaactggagctggacgaccagtccgccgtgatcgtcgccatcggggacagctttgaagaaaacctcctcgtcgtcacgcacctccagaaaatgggcgtgcgctacatctacgcccgcgtgatgagcccggtgcacgagcacattttaagccaaatgaacgtgtacgcgctcatcaacctgtcgcgcgtggcctccaagcagctcgccagccagctggaatccccggaattcctgcgcgtctcccccatggatgagaaccacagcatcgtggaaatagccgtgccgcgcatctgggtgggcaaacgcctccgggacgtgggcctgcgcacggagcaccatctcaacctgctcaccatccgccgcggagaagcccagaccccgcaggggcgccgggaaattctttccatcccgcgcattcccgtcattggcaccccttccccggatctcgtctttgaagaccacgacatcctgatcctgttcggcaaggagacgaacctgattgaattcgcccagttgtccaagggcctgtaaacccggaccagtcccattccggaaaccggtctttcaggacagctcttcaaaagcggtcatcaagcgcttttcagagatacggcccttgacggagatagcgggggcgaagacggccaggcggtattcttccagcagatagccgtactgcgtccagcgcgggtcgccgtcatgttccggcagggcctgatgccaggggaggtacacgcgttcaaagaggtccaggcgttccagctccctggccaggggctgctggccgatgcgcctgatgcgttccgcgatgccctgcatgtaccgtttcaggtccggcaggcgttccgctccatgcgcccacaggaagcgggagcggagcagccagtcaagctggcgccggaggtcagccgtgatgcgctccgtatggcgcacgccctgctgcgcggccataaagtccctggcggcatgctccgtggccgctatcaactcccagacgtccgccacgctgtgggcggcgtcaaagaggttctggcgcaggctcatttccgcagcggcgaattgttccgccgtgcgcgggagggggcggcccatggcgatctccgcggagacgtccaccaggtcgtccgcattggtggacgggtccctgcccagcatgtgcagggaaagcttcccttccagtttcagcgggaatttcttgcggaggtggttgagctggtccgtctggcgcaggcgcatgaagcgcaggcagcctctccggtgggcttcttccgcgcgcagttcatcctcaaaaacgcggacgcctacagacgggccttcatccaccagggctacgtaacccggccttcccgccacgtccaccgtgcgctccaaatctccgcaggtccattccttcattccggttacggatacgatgtccgccgctgtttcccggaaccggcgggagagctttttgcccagccgcgcattcagctccgcaacgtccgtacccatggcaagctcttctccttcgtcgtcgcagacccagattttcgtgaccagctccgccggaatgcggttcatgtcaaagaaggagggagcgcagaaacgcccggtttccgcttccacgaattccgccagcttctgcgccagcggcccgtccggctccaggccatgccggagttccgcaaagtaggcggccttctggctgatgggctggagaaagacgcgcaggtccttgggaagggtgcgcagcaggcattccgcccgctgggccagatggcccgggacgccccattccggcagccattccggcacgtccggcaactggtcaatatggacgcccagcgtcacgccgtcatcttccgcgccggggtcattctggtaatacacggcgtattccgcgccgccgcaggaaatttcatccggaaagccgtccagaaggtccctgccccagaaatcatacatggcctcctgcggcggaacgtgcagggcttccgggttgtctttttccatgcttccggcccagcgcagaaaggccctggccgtgcagcagtcctgcggaatgagcctgtcaaagaattcaaaaacgccttcctcgcaccagacctggtccgggcggcgcagcttcagttctatctgccgcacttcctcccggagcgtttccagatgcctgatgcatccgggtttcgtacggaagccgccgcccagcagtccttcacggatcatgatttcccgcgcatgggcgggattgatgcggccatagtggacgcgcctgttgtcaatgatgcgcagaccgccgcacaccacgcgctccacggcgtaaaccgcgccctgctctttgtcccaccgggctccggaataatgggattcacagagatggggagccacctgttccacccattccggctccagccgggcggcgcggcgcatccacaggcgcgtggtgtccaccagctccacgcccatcacccattcgctccgcttcttgcggcggaacaggccggaaccgggaaagatgccgaaggagcgtcccccggcgccgcggtattcccggttgtccgcatcccagaggccgaactggcgcggaacgcccgccaggatgctccggtgaatcatggcgaaggaagcctgccgttccacttccgcctccaggggggggatcctgcatttcaaggtttccttcagcagccgggaaaggtcttcccacaggttgaaccattccatcatgcggttgaaattgaggaagtttttcccgcaccatttccggagctggtttttgtgccagcgccggccttcccggaactgccacgcagccttccacagtttgagcagggacaggaaatcgctgtcttcatccttccactgcgcgtgggcctggtccgccttctgcgcggcatccgccggacgttcccggggatccatgatccccaggccggccacaatcaccagcatctccggcagggcctgttcatgctgcgcttccagcagcatgcggcccagccgcgggtcaatgggcagccgcgccagcttcctgcccacgggcgtgagctgccgggccttgtccagggcgccgatttcccgcagggtgcggtagccctccgtgaccagcttggaggaaggagggtccggaagggggaattccggcatttccggaagacccaggtccttcatccggagaagagccccggccagcgcgctgcgcctgatttccgggtccgtgaagtccggcctgtcctcccagtcctcctcactgtacaggcggatgcagacgccctcgcacacgcggccgcagcggccagcacgctggcgcgcgctggccttggagacgggttctatctgaagccgctgcacctggcgcgctgggctgtagcggctgactcgcgccaggccggagtcaatgacgtaaatgatgccgggaatggtcagggacgtttccgccacgttggtcgccagcacgatgcggcggcagctgcgttccggatgaaaaatcctttgctggtctccaaggcccagcctggcaaagagggggaggatgcgcgtattcctcaaatcccggccttccagcttttccgccacttcacgtatttcacgctctccggggaggaagacgagcacgtccccgcggtcgtccagggtgtctagccagtccacggcgcgcgccacatgggcggggagctcttcatcatcacgcagaggcggcaggtaatgaaggtccaccggataggtacggccttccacctggacgatgggggcgcccccgaagaactcggaaaagccacccgcatccagcgtagcggagctgatgaccagccgcagatccttccgcctgtccagcagaagcttcaggtagcccagcagaaagtcgatgttgaggctgcgttcatgggcttcatccagaatcagggtatgatactggcgcaggtccggatcatgctgcgtttccgccagcagaatgccgtccgtcatgaacttcaggcgcgtgtccggcccggctttttcctcaaagcgcacctggtagcccaccaggccgcccagttcgcaattcagttcctccgccacacggcgggaaacggaagccgcggccagccttctgggctgggtgcaccctaccctgccccgcgcctccccggcaagctccatggccattttgggaagctgggtggtcttgccggacccggtttcacccaccaccacaatgacctgatgctcccgcatcgccgccagaatgtcgtcccggcggcgggaaatggggaggtccggataagtgatgttcatgatggagggagaaaaaaaccctgcaagaacgtcctgcagggttgatggaaaagccggaaaggatttctttactgccggggtttgggaagggcgatgcggccgctccgggtcagcatctgcacgtcgtaatcctcaatgagagacaggaagcggtcaatcttgtgctcaccgcccgtcacttcaatggtcagggcgtcccgcgtgacgtccacgatgctggcgcccaggatctggcagaattcaatgacttcatgccgcgaagcggaatccacgccgatgcgggtcaataccgtttcccggtacacgttgtccgtgttgcggaaatccactacttccaccgtgttgacgagtttttccagatgcttgatgatctggtccagaacatcctccttttcgcgtacgacgatggtcatccgtgaaaagcgcgggtcctggctaggggcaacgttcaacgaatgaatattgtagccccgtccactgaacaaaccggcaatgcgggcaagcacgccaaatttgttttcaacaagtacggagatagtatgacgagtcataagtttaatttcttaaaggtgatgcattataggcgcttttgactgccagtcaagcccgcggcataaggatgccggaaaacgcttctccggatgcggtcttccgcagacgccgcacaggcggaattcaaagctcccgcggcatgatggcgttgctcttcgtcgccgtgggaatgcggggcagcagcgtcttttcggaaaccgggcgggcatccactttcacgttgaactgctgcccgtcacgggaaacggtcagcagggccggcccctccctcaaagccctgaccagtgcatccatagtgctgacgctctgatgattcacggcaaagaccatgtccccggcctggaggatctgccccacggatttcttcggattcacctggatgaccagcaatccccgcgcgccgatggactgttcctcagcggtgagttcacgcaggtgcatgcccactccttccataaagtcctcccacggagaaggaacgttctttaaaatgctgtcccccactttcagggtgacgttcattttttgtcccttgcgccagattttcagccggaatttgtcgccgatggaaagattttcaatgtggtccttcacatccttgtcggtctggatgggaacttcattgaagctcagcatcacgtctcccgtctgaaggcccgcctgctccgccggggaaccgggcttcacgatgttgactactgcgccgcctgcttcatggtagtccaggaaactgcggagcgggggagtattgcgcacaatgtccagccccaggtatcctctcatggggcgtccatgcctgcaaatctgctcaaagctgtgcaccaccagattggagggaatggcaaagccgatgccagcgtagtttttctccacattgggaagcaccgatttgttgatgccgatgatttcaccgcggatgttgatgagaggccctccggaattgccgggaaagatgctggcatccgtctggatcaggtccaggccggaatccaccagcttgcgttcacgggcgctgatgatgccgcgggaaaccgtcgtccccagtccataggggttgccgcaggccaggacgatcatgccgggtgcaatctcgtcactgttgccgaacggaagaggcgtgaaggccatcgggttttccacctgcagcacggcgatgtccagctccggatccacccctaccaggcgcacggaaacgcttttcccgttgctcagcgtgacgcgcagcgcatgcttgttctgaatgacatggtaggcggtaatgatatgcccctcttccgtgacgatgacgccggaacccaggccatggaccgccagccttttttcaatcatggattcgccgtcttcggaaggctgcggcacgctggtcacgcccgtggtgtctatgctgaccagcacccgttccaccagccgggcgacgcgtgaatattcttcattgagctggtgcaggatgggaacgtcctcctccttgagttcggactgctgcgccatcgtaaacacctcagaccggaaggaaacgttcttctccgtaacgcggctgttccacctccaataggcaacggagacgacggtcatcataaccgtcatcatgatgacaagtaaagcccgtgtccatatagtcgatctcatggaaatgccctgccgtagtaacgatcaaacggtttgcggcttgatcacgaggagatgcctgaaaaatggacctggaagactccagccgctttttgacattccggttctattgatactatttaagcctattctcttcaaatgaaaaaactttcaaatgacaaatacgtcttttaacgaggcatattttatgataccgtatgggtacggttttatgggtaccagcactttacaacaacaagccattcacctcgttttcggtacggacgaaggaatggtgcgtgaaaaggcttccggcatctttgccgccctgacggaaggcacgaatgaattttcccatgaaatcctggaagcggcctgcggcgattccgatgaagcggaccaggtgacgcgccaggtcatggaagccctgcgcacgctgccgttttttccgggccgcaaggtggtctggatgaagaactgcaattttctgggggattccgtcacggggcgttcctccaccacggaagcggctctggactctctcaggcatctgctggaaggggggctgggaccggacgtcctgctgctcatctccgcctccgaatttgacaagcgccgttcctttaacaaattcctgctccaatccgccgccgcggaggaactgaacaagccggacatcaccaaggccggctgggaaggcagcctgatgccccttatcaacaaggaggcaggcgcgcggggcatgaacttcgattccgccgctctggagttattcattcaccgcgtcagcgaatcctcccgccagattatttccgaaattgaaaaactggacctttatctgggcgcggacaggcgcaccgtgatgccggaggatgtggagcgcatggttccgctgacgcgcacaggcgttatttttgaaatttcacgtgctctggaaaacaagaagagcgacgcggccatctccctgattgactttcaactggaacgcggtgaaaacgccgtcacgatcatgcgcgcagcgtttatccccacgctgagaaatctgctggccgccaggcttttatgtgacgcgttcaatctgaagcccaccaacttcaaggaatttacggcccgcatctcctccctgccctcctatgccgcggcgctgattcccctgaaaaaagacggcactcccaatgcgtacccgcttttcctggcggcgcagaacgcttccaaattcaagacggaacggttgaagcagactttaaaggaatgcatgaaggcggacaaggccctggtatcttcttcgcttgatccgcggctgattctgcaccgtcttgccatttgctccgcatcctgatgaattcctctccttcccccgcctcctccctgttcgacgtcctcgtcgtcggcgccgggcacgcaggcattgaagcggcgttggccgcctcccgcctggggtgctccgtcgccgttctgacccacaacctggataccatcgggcaaatgtcctgcaacccggccatcggggggcttgccaaaggccacattgtccgggaaatagacgccctgggaggggccatgggactgaatacggatgccaccgccatccagttccggatgctgaacgcctccaaggggcccagcgtgcgcgcaccccgcgcccaatgcgacaaaacggcctaccgagcacgaatgaaaatggttctggaaaccgccccgggcatacgcctgttccagggtgacgtggtcaaactgctcgtcaacggggagcagcaggtgacgggagccgtcacttccctggactacaccatctgcgcgcgcagcgtggtcatctgctccggtacattcatgcaggggctgctgcacgtgggtcttcagcacataacgggcggccgcatgggctgcgctccttccagcctttccaccgacctcgccgcgcttggctttcaagtggaacggcttaaaacgggcacctccccgcgcgtcaatggaagatccattgacttttccgtttgtgaaatgcagcccggagacgcgccggaggctctgttcagttaccgttcccgcgacgtactgaaacgcgcttccgaacctttctgcaccctgaacacatggggagacgaagacttccgcatgaagcaaatgccgtgctggattacctacaccaatcagaccacccacgacattatccgggacaatttaaaattcagccctctctatagcggcatcattgagggcataggcccccggtactgtccttccattgaagacaaaatcgtgcgctttgcggaaaaaaccagccaccaggtcttcctggagccggaaggccgcagtacggaggaattctacctcaatggcgtttccacctccctgccctactccgcgcaatgcgatttcatccacaccattcccggcctggaaaacgcccaactgattcgtccggggtatgcggtggaatatgatttctgccctcccacgcagctgcaccctactctggaaaccaagctggtggaaaacctgtactttgcaggacaaatcaacggtacctccggctatgaagaagccgccgcgcaaggtctgatggcgggaacaaacgccgctctgaaaactctgggcaagccctccctggtgctgcgccgcgaccaggcctacatcggcgtcatgatagacgaccttgtcaccaagggaacggacgaaccgtaccgcatgttcaccagccgggcggaattccggctgctgctgcgccaggacaacgcggacctgcgcctggcccccctggcttttgaaacgggcctcatcacccgcgaaacgttcaggaaaacggaagacaggcaaaacgccattgaggaaggaatagcaaaagcagctctgcttaaacatgaaggcgtttccctttccacctggctcaagaggccaggcaatgactggaccctgctgcctgaagaactgaaaaaaatgttccacgtggaacatttggatgccattgccacggatatccagtatgaaggccacattgaaagacagaaaaaacaggcggaaaaaatcacccggatggaaagtaaaatcattcctgccgacattgattacgaacgcgttcacgccctgaaaaaagaagcggtcatcaagctgggcagcatacgtcctgccactatcgggcaggcttcccgcattccgggcattactccggcggacattgccctgctgcttgttcatttgcaaaagcgcggcaggcagcaggcatgaaagcctgcgccgttttcatgccggggctttaaatttgaatacggcccaactcctgaatgctgaaaacttgcatgcatgcaaggtaaaagcctcatgctctccctatgacccgttttccactccctgcaggctccggtttataaacgaggggagggggggctttttcctgaatattttcccctgtatgaccgatacgcttccggctcggttcatgccatccggcttgtcttaaaaaagggacacgaacagagaggatgcacaatgatgagaaaaaccgccgaatggcaggctcaccggtaattaaagatgctttcccggtttaaaaacaatccggaaggcgaatgaataattgactgtgcccgttaccggtagcttacgtcgccccggatgcacacatcgcttccaaagatgctcacaaccggctgctcaagaaaggcttcacgttccaggaatgaaccgcccgttacgccgtctgcgccgccgcccgttatgatgggcgcgtaaaatcccacccattcatccaccaggccggctttcaggaattcccggaccaggcagcctcccgcttccagcaggacagtccctgtttttctttcattatacagattttttaataattccaaataacttgaaacgttctctacaatcagggtccggtcacggaattcatccgtcaggcaaacggaatccgcaggaatggatgcggcgttgtgagtcaggataatgcgccagggctgttccttaagggaagaaacgggacggtccggttttctgatggtcagggacggattgtccaggcgcatggtatttcctccggtaagaatcgcatcgcactcagcccgcagggtatgtacgaaagacctggatttttcattcgtcagccactgggaccgttccggactgcgtgaaatgcggccgtccagggacatggcgctctttgcgatcacccatgggcgcccctccagcatgttcagcctgaatccccggattaaatgatcgcattccttttccagaatcccgcgggtgacttggatgcctgctctcccaagaatatcagccgcggcgccgcggtgtctgggattggggtcttgagagccataaaccacccgtttgaaatggtgttccagaatggcttccgtacagggtggcgtttttccggtggtgctgcacggctccagagtaacgtacagagtggaatccgcaaacagggccgcgttgcctctggccgttccatcggcaatagccttcctttccgcatggggcaggccggctttttcatgaaaaccggagccgatcacctggttttcatgcacgatgaccgctcccacgcagggattaggacttgtcagcccgacccctttttcggccagttttacggccatgttcatccagcgcgtatcttggtcctccgtgttcatgccgaccttgtagcacgaatgcgcgagaaaggacaatcacgttgtgtgattgaagaatattagatttaacaatattaaattccttcttcttctaccctgtgcccagtgtgaacaacgtttttaccgcctgggaatgaatggattgaaaccatccgacagtgtgaataaattcggttcataaaaatgtggataacatctgaataacttattcacaccatactcacagttaattgacttatcctttcacagggttattggcaagtggaaccgtgaaacggagccgcacgttccgtcttgcggaagcgccgtaagaaagcataccattcctccatgagggttgccagattgatttacattccggaaagggaccatacctttcccgcaacgagccctgagaggctcttccgcggcttttccgtggccggggtgagcgtagccgcctattgtgcctcccggctccgggaagcgggctttgaggcggtttttaatccggaagccgccgttacggaaagtgcggcggaagtggtagaggtgtccatgcatgatttttccccggaagctgccgcatggcttgcttcctgcgggacaggggaagtacggaatgaagaagggcggctgctggcccggaaagggccggggaacggactgtcacgtgttttttccgggcaggaggcggctgtggagcgcctcgtctatccctgggacctgctggactggcaggagagagtgatggagggaatggagggagacgatttttccgggcggccgggcgtttacgtcctgggcagtctccgtgtgggaaagggcaccgtggtgatgcctggcgtggtggttgagggctccgcatgggtgggggacggctgccgtcttgggcccaactgccatttgagaggatatgtgtccatgggaaacggctgtgtagcggggcagggggtggaactgaagaactgcatcatcggagacgggacgtttattccccatctgagctatgcgggtgattccatcattggcagcgacgtcaatttcggggctggaacggtgtgttccaatttccgccatgacggcggggagcacaggatgatggcggccgggaggctggaaattaccggaaggaacaagctgggagccgtcattggggatcatgtgcgcctgggcgccaataccgttgttttgccgggcagggtggttccgcccggcgcctggaccatgccgggggaaacattcacgggaacatgaattccgggacggaagtgccggaatacggaaaaggccgcatgcgggggaacccttcccggcatgcggcctcttgctggataacggcaaatgcttagcagctccggcggcggcgcatcagcagggcggccaggcccagcagccccagggaagcagtggccgcttccggaacaggaagcacaacgccgtcgtgaaatttgatgttgttgacatctatggttccgttcatgggacgggtgtttccaaaggaagctccaaattgggagcctgtcagggcaggggaggacggattccagccggtgatcgtacctgccagggtgccgttgacgtacacggagagagtctgggaggaaagatcggaaacgatgctcagattgttccagttgtcctgctggaggtccgtccaggtcaggcctgtattgatgtttccgccggattggcctccaaatcccttgttgtaaaaataaagttccccggaagcattgaattccagtaccatgctgttggattctccggaaaccgttccattggaatacaagctgaaaacgtctttccaggcgttgttggtggaactcaggtttttcaggtcgaagctgacggtgaaactgcctgaaattcccgctatgccagagttgtagggcgtgcctccgccggagccgctgccgaaagtggcataatcgttgccggttgtataattgaatgaaccgttccagccgggagcagttatttgcgttccttcagtggtccactcccaggaataaatgggagaagccgcatgggccatgcctcccgcaaccagtaaagacaaaataatgaatgaacgtttcacagaaattctgaaagtctttgttgtttaaaatcgccgaagcttggctgaaaagtagcggatttcgaatccggggtcaaattatttttttaagaacaagccggttaacaaaaagaaagatcacggaaaaataaaagcatgaaaggaaacataaacagcgcttcttccggatcgtgtatatgttcaatgaatttgccgctttccagaggaaaaagaacggcatccggattcgaaatccgcgtgcgcgtcaaccgggaattgttcgccggagaacggacttttaagaatacttaaataatttgaaaaaccgtttcatgcaagatatgcccggagaaatagcatattactacatatggtatgcttttaaaaaaatactgccaaatattagggtttgacggagaaatggcttgaatcacaggaggcacttgtgagaggatgcgaggcagataaaagcacagacacatgaagtttaccatttccaagcaagtatttctcgacggtctgagacaggttgccagcgtggtgtcttccaagacgacgctgcccattctttccaacgtcaagattgaagctgaaaacggccaggtacgttttacggctacggatcttgacgtatgcatcaccggcgtagttcccgcgaacgtgctgcgcgagggcaccgtgactcttcccgccaaaaagctggtgagcatcatcagcgagcttcctgaagccgaagtccaggtggacgtcaaccagcgcaaccaggcgactgtggaatgcggccgctcccagttcaagctgaatggccttccggcggacgaattccccgaactgccgtcctttgaacaggcgaccgtgtaccaggtggaccagaatttgctgcgcgactgcatccgccgcacggaatacgccatctctacggatacgacccgctacgtgctgaacggcatttccctttccttccgcaacggcaagatgactctggtggctacggacggccgccgcctggccctggcggaaaccgccctggaattcccggaagaacagcaactggacgccattctgcccaccaaggccgttggtgaactccgccgccttctggatgaagtggggaccgtcaccgtacggttcacccgcaaccaggccgcttttgaaatcaatgacacgctgctgatcagcaagctgattgacggcaattacccgaactaccgccaggtaatcccgacggactgcaaggaaagcattgaactgccctgcggggaactgctggaaacggtgcgccgcgtgtccctcctttccgtggacaaaagcacgaacatcaagctgaacttccgtgaaaacgaactcgaagtggcttccagcgcggaaggcgtgggtgaagctcatgaatccatgacgatcacttatgccggaaggccgctttccatctccttcaacccggatttcttcatggctcccctgaagacgatggccggggatacgatcattacgttaaacctcattgatgaaatgagcccgggcgtattgaagataggtgatgagttcctgtacgtgctcatgccaatgagatctcccaactgattttgatggtacaaaatcattcatacgagaacaggcgccgtgctgtcacggcgcctgttttttattgattgaaaatgaaagtgatgactgggttattcacatgaatgttctacgtggaacatttttcattttccaccgtcggcaataaaccggacggtgatttccgggggagggataaaaaaacaggcgtgccggcatggcaccggaaaaaacgcgtataaacaccttccggcgccgggaacgtgcggttcaggcgcaagggaaggcacggagtgccgcagcgggtctaaggaggctccgccgcgtcattcgctcaacaaccccggatcggcgaacaaatccggagcaagatggaaaggataggaaccggaggcttgcagaatggcttcccgtacgggaggcagggaaccgaagcaggaggattccacatccagaatacggccgtctttcagttcaatcatcagtccgggttcagattcatgatcgggcgtacatcctatgcgctcaatcagttcccatggaatttccttgcgtgaaatgctgttgccccaggagatggaggaggaagtgattgtgagaaaataaggtctccccagaatgacgggaagccacaggaacaagagaagagcgccgaggagaaagctccaccatccggacccgaagaatgcccaggccaggccgcaccccagggtgccgaggagtctccctcccagccggtagctgcggtaggaataataagtgttcatgaattgcgaagtcaatgaaacgtcaggccggccagggaacgcgaagcccccagccgtactctgtacgatactccttcattcctgcaaagacaagatgataagtcaggaaatccagtccagcatgtccggcggcagggaaccgcgggagcggatcagggaaaggaaagcttcctccatttccggaggcggcggaaaaatgcccggcatggcgcggcctgcggcaagctccacggcgcccaggttatggagcgccaggggagggtctatgtagcacatttgcgtagggtccggcagaatgaaattaagggggcggcctccgttcagcaggcggttcttcgggatctccggcccccattcgtcctccacgcccatattggccagcagaacgccggaggagcgggtcacagcggggtcaatcactcctgacagggcatgccgccgccctgtggccgtgacggcgcaaaaggcatgactgactgcattggtaagagcttctccatccgttgcgcgcacgaatgaggcggaggacagagggagaggtttttcctccacatccgccacgataacgttcaagccccgcctgagcgcgtgcagaacgattccgcggcccacttttccgtacccgatgactaccagggtccgtcccgggccactctcaattcccagcgcttccagcgcgcggaaaaagctttccccggttcccaggcaggtttctatctgcttgatttttccggcgtccaccatccacacgggctgcgtgcagcgcgtataatgctgcgctccggaccgggtcagttccacatacccgcagcggctgggaacatggctgagcgccccggcgcagtccatcaccacatcatagggtccgtccgcccgttccgcctccaccacgggtattccatacctgcccagcagcgcgaccgtttccggatcgtggggcatcaccggagagaccgctgccgtcaactccgctcccgccgccagcagggcggcgtatttggcgcaggtattccggaatacgggggaggcgtcaatcacccggcatccctccaacggacggctttccgcccacgtttcacactggtgcagaagcacgggaaattcttcctgccggtagaagggggacaaatcttctagaatgcgcgccggagatacaggcatggcaaaaattgtaagggttctacggatggagggcaatctttctcctcccgttttcatagaaaaacttcggaaaagatgtattttttgtttaagggttttcagaagttgcggcaaattcgaaaagacaaactactgaatcatcaaccattctttctccatgagagagacattttttacaggaatttgactggcgccaagcaggaatgacatcctattgtggattttttctaacaaatagataatattgatgtctgtaaaaggaaggtactgagcgtaataattattatattattttttgatggaaaaaatcgttatgtttcataggcaaacaaaaatttgcaaataaactttattgacactggctctggatcatgctactgggaaaatgatcatggaggattgctctcctctaatttcatcatcaatcccagttctttaatgccttatgaatactccaactacttcttctgccggcaccccttcttccatccccgcttaccgcaaatggtactttggctctacggccaaacccatgccgcgtggcatgcgcgcctctccggagcccgatccgctaccgttcgaggaaatccacgaacacgatgaaattaccgtgggaccgcccagtacgtcggcggatggacacagtgctcacggttactttaccattccggaaggagcggacggtaaaaagctctacggcacctgttcgctcttcctgggggtggacgactggggcagcctggaagtgaaggactccagcggcagcgtggtggcgcaggtggacctgaagaaagactcgcagacggcaggcaagcagggcggccataaataccacacggggaccggcggggcgcagctgccctccggctcctacatttgggaagtcaaccagaccaacatcgactacaagcctgaaaaagacaacgtctccatctgcaactatagcatcgacgtggtgccgacggagccgggaggcaaggaggagcccgagaagtgcccgtgcgagggagacacgtgtgataacagcggcggaacgccgccttccccgtcgctggcccggtcgggctccgcggtggggaatagcacgctgggaaactactcctccgcagggtgcagtgtgagtgcggaaagcacggccaccctgatgtactggtcctgcaacttcggaatgttccggggactgggagggattcctgcgggccttgtggaactgagggctgaggaaactgtctccggcctggaaagcccctcctcactggcctacaaccatccgttgaacagccgcctggacgtgcccgaagggggaattgtacccggagtgcgttttgatctggtgcagggagaccgggtgattgccatgcgctgctatatgaacgggtccgtgctgcccgttggcgtggacacgtcgggcggaggacgggcaacgctggacacggtggaaggacaatcctgcctccgctggatcgtggaagacggcagccaatacctcttctcggcggaaacaggaatgctcctctcctacaccaccaccgacaagcaggtcatctccaacgcgtcatcctacctggacgtcaagcatgccgaagacggctcgctgaggcaaatctggaacctgtgggacggcctgctcaacgtggaaaacgtcacctccacgggctacatcatcgcgctctacacgcctgggcaaatcaccggaacggacgaacagggattttatacggtcaccgggacaccctttaaaacattcaacctttccctttccgcggacggccacttcaccgtcacggaacaggcgccggctaggcagccctacgccgtcacctggtggaacgacggcctggcgtggaacatgcggcagggcacgggggaagacgccgtcacgaccatccgcacgcgcacggagctggaaccggaagactcggtctggcagctggtgacggaaatctccaaaggaggtatcgtggcagagcgcacctgctccatatatcaaacgacggacgtaggcgatctgctgctcactcaagtggaaggctatcaaagccaggaagcccagaccacgcaatacgcctacgaccagtgcggacggctcaagacggaaactgccccggacggcagccaaattcattacgcgtatgacctctacggacgcctgctctcccgcgacgaaccgtgggcggaaagcggcaggcgcatcacgcgctacacctatgcctattcgggagaagccgacttcaacgacgaacccgccacggaaacggtagacctgcttccgctggaaggacacgtcaagacgctgaccaccattgcctacaagtacacgacggccaatcacgtcaaaaggacggaaaagcgggtcaccggactgggagtaacgggcacgcgcctgacggccacggaacaatggctggccggcgcgcccgacgtctatgcccgcggacgcacccggatgacccgggacctcaccggcgtgcaaacctggcacgactacgcggcaacgacggagcacggcgccctctacacggaaacgttggaaacgcgcgtcaacggggaaaccgtgccgggacagagcacgcgcaccacgacctggatcacggcggaagggcagcgcgtcagggaagaaagctacgccctgctcaccggcggggaatgggcgctcacggacagcgcctcctatgaatttgacacgcagaacaggtgggtgaagcggacggcgggcaatggccgaataacggagcgcgagctgatgtgcgacgggcgcctgttgtgggacattgatgaaaatggtgtaagaatggactatgcctacgacacggcgcgccaactggtggaaaccacgcgttccgccgtaatggacggggaaaccgtcatcacgccggaaaccatcaccacctacaccctggatgcggcggggcgcatcctctctacgcgccgggatacgggggccatgacgaccagcgaaagctcggagtacgacttgctggggaggataacttcctctacggacgtcctgggacgagtcaccacctacgcctacagcgaagacggtctgacgacgacgcaaaccactccctccggagccacgttcgtcacgcgcaacgcgccggacggaacggtcctggaagaatccggcacgggacagcggcatatcatctattccctcgacttggttgccgacggcgttcggaccttcacgaaagccgtctccggggaaacggaaaccgaactgcagcgcagcgtcgccaacggtgccggggaaattctgcgcacgggccggcccaacaccatcgggggagtcatttacacgaggaacacctataacgccaagggacagctgaccaaggaacagacagatgcggaaaccgcagctacgacgatggcgccgaccctgtgggaatacgacgacttcggcaataaggtcaaggaaacctggaagcttgccgatccggccaccgtgtccaactcgcgcatcaccacgtggagctatggcgtggaacaggcgcaggacggcgtctaccgcgtcgtcacggcgactaggaacaacggccaagggactacctatggcgaaacgcagaagacgctggtttcctccctctcgtccacgctggaaagcaaaaccgtcttcatcggtcccagaggaaatatatccacacagtggagcgaatacggaacaggcgccctgcggacgcaaaaaagcagcatccccacttccaatgtcacggccaccgcgacggtcatcgacgactttactaccacgcagacggaccacgcgggcattacttccacgcagacccgagcctatgcggaaaccggcatcatctacactaacacggacggacggggcaacaccattacgacacgtaccgacatcgccgggcgcactgtttccgttaccgacgcggcgggcaacacggcttctaccgcctacgatccctggtttgaccagccttccgccgtcaccaacgccctcgggaaaacgacatgctacaactacgatctccggggccgcaatacggcgcaatggggaacgggcgcccagcccctgctcttcggctacgacgaagccgacagaatggtcagccttaccaccttccgggaggacgcgggcgacatcaccaccgaccccacgggacgcacggacggagacgtcaccacctggagctatgatgaagccacggggctgttggcgcgtaaaacctacgcggacggaacgcatgaggacaccgcctacaatgccctgaacctcagatccacgctcacagacgcgcgcggggtggtcaccacctggggctacaatctgaagaaaggggtcaacacctccgtctcctacagcgactccacgcccggcatccagtacgcctacaactgcctcaaccagctgacccaggtgacggacgcctcaggctctcgcaccatcacttacactccctacaacgaaccggacaccgatagcatcaccataggaggcgcctcctgccagctccaggaaaactacgatgcctacggccggtcctccggctataccctgaaacagggaaccgacgtcctccaggaagcaagccagggctatgaagccaacgggaggcttgccggcgccggaatcgtgcacggaggagaagaacaaaccttcgcctacggctacctggcgggaagcagcctgccctccagcctcgcgatgcccaacggcatcgtccgggaacttgcctatgaagaacaccgtgacctggcagtggccataagctgccgtctggggggaaccgcgctggtctcccgcagccagagctacgacgcattgggacgcccggtcacccgcacccagcagcggggaaccgaagcaactcgtactgacagcttcagctacaacggcagaaacgaactcaccggggctactctgggaacagccccctacggttacagctacgacaacatcggcaaccgcaagacggcgcgggaactggccgaggaactttcctacgcggccaacaacctcaaccagtacacaagcatcgaagaaaaagcggaggcgccttttgtgccgacgtacgacgcctcgggcaaccagaccctcatcaaaacctcgacgggcatttggacagtagtctacaacgcggccaaccgcgcggtgagcttcaccagccagggcggcagtacggtggtggaatgcggctacgactaccagggacgccgctacatgaagaaggtcaccgtcaacggaacggtcgtcagccatgaacgctacctgtaccgtggctacctgcaactagcggcgttggacatgctggacaaccggaacgtgcttcggacactgctgtgggatccactggaaccggtggcaacgcgtcccctggccctggtgcaggaaaatgccctttactgctatggagttgactttaacaagaacgtcacggaggtgttcgctggagagggagctattgcggcaacttatgactactcgccatacggacaggttgtttccacgggggacctcgtccagccggtgcagtggtccagcgagatgaacgatgtagaattggccctggtctattacaactaccgttattacaatcccgccgatggaaggtggatcaatcgtgatcccatcactgaagaagggggatggaatttgtatgaatttatgggtaatatatgcgtatataaatgtgattatcttggattaaaagactggacatgtgataaaaaacatttggggtggtacgataaattatcctttacattaacaaataccattggaggagaggaatacgcagtatctgatccccaaagtgttattattggtacttttaaagaaaagcttcaagatgcagcaaaaagtatattagagcaggaaatagacggcagacaaattattgaagcagctagaaaagctgtcaatgataattggtttatgcgaagtctttctggaatagtacaaaatactcgaacgaatgcatatatattggaagaaacaaaactaagtgttaagttggaatattgttgttgtgaaattgacaataaaggtaaaataaaatattttatgaatcctgtatcgggcgtagatagctttaatctaatattcagtctaaaagaagctagtatgagaagaatgaacacctatactaatcaattaaaagtcatgctaaaaagaactgcatcgaaccttaagaagaaagcatgtaaaaagcaaaaaaaatgaataatcttaaatttatattttacttatcaggaatatacttgattgcagttcctgataacatagtcttggcagaatcttcatcatgcatcccaagccatgcaaccaaaataaataaaataagatcaggattgccgatggtgcaattttatgagaaaactttggcattgtatatagaagcaaaattagcatattctacttctgaattgccatcctctttatttaagcttcttacaggttgctctcaaaaagatataagtaagtcttctgtaaattttttaaccgatataatatacgattatcttatagccgttaaaactcatcagatacctagatctgccgaaattgaagccatattaattaaccatcttctaatgaaggatgaaggggatgacaaggtcattaactcaatcaacagacgaatcggaccagaaaccggtataaaaataagaatttattcagattctgagataaacgatatttcagataatttatctcatactatttttcctttaggtagttttgaagacttatcttcttatccgatatgctctattgattcttattctcctgaactaatattatacgtttatgaaaatggtgtttataatttaaaaaaatgtgtagaatttttaaataaaatgaaaccttctgatatgttttttaatgtgcatgattattattcaaataaactgaatttacttttatttaaaacatggaacatgttaaaaaaagaaaaatacacagaaagtcaatgggagctattttatagcattcccctatcatctatagaaataaagaaataaaaatccttttgaatgtttagatttttataaaaaataaagtctacgattttcaatttttaatttgaatcctaattaccgcaatcgtgcgatgagcttcaccagccgggacggcagtacggtggtggaatgcgactacgactactagggacgccggtacatgaagaaggtcaccgtcaacggaacggtcgccagccatgaacgctacctgtaccgcggctacctgcaactagcggcgttggacatgctggacaaccggaacgtgcgtcggacactgttgtgggatccactggaaccggtggccgcgcgccccctggccctggtgcagggtgcctctctttactgctatggatgggacttcaacaagaatgtgacggaagtttttgatgggcagggaacgatcgcggcggcttacgactactcgccctatgggatagttggcagcacaggcaacctcgtccaacccgtacagtggtccagcgaaatgaacgatggcaaattggctctggtctattacaactatcgttattataatcctgcagacggcaggtggattaacagggatcctatcgctgaagaagggggatggaatttgtatgggtttgttgataatgaagtggtattctctattgattatctcggaaaagaaactaacgaatttggctacacaatgactatccctgcgggttacatacccattcttcttattattgagggaagtatatcaatagaaaaaaagaaaaattgtgtatgcattgaagcaaaattacgaacagatgttggtataggtgtagcataagacttaaaattaaacaaaaatggttgcctattctgcctgatattgaatattctttacgaactatggttgctggattaagtaatgaaaaaatacttaaaattgacaattgtaatggtaaaacttcaacatcctatcgggaagaattattaggattgtctcatagaattgatgcggatattacattatcatcttatatacaagcatcttattctattgattttaagataagtgctgggttaactttgaatgcaaaaccaatatctttaactttagatgcaacggggtatgttaagattgccgctactttgaaaattccattttttatagatcaaactgaagaaatcgctaacaaatcttttaatgaaaataaaaaaatatggtctaaataatgaacacgatataattagtcatctttattatgatttaccctgaatctcctttaactggatatgaatatttcgaattagtttgtggatgtatttttgtaatcctatttttaagaatccttgtttggatcaaaaaaaatactcttaatttttcatttaataacttccctttttcaattatcaaacttacaatttatttatttctgatctctggaataattggagttttgtcaacaatgtatcatggtataaatctattatgggaaaacttttcgaatgaacttttaatatcatatacagcattaattttttcttatcttattatagtcattgagtgtttcagaataatagatgttttgaagaaaatcaaaaataaatctgattccaattgaaataatcatgaaaaaatgttttcagacttgttttataagaagctagcgtattacaaagaacacaggaagagaattgaatcggaacattttccatatgatatcagagcgtttatctacccgtacgattccccccccacttcaccacttttgccatctaggccatggcctgccttgaactaaaaatgtagatttatgtcttctatactgtgggttcttatttcgtcctttttgatgtgtttattaacatcaaagacaaagcaagaagaaaagttttataaaaggagagaaattcagaatatagttagaaaatacaaaatcagtgctgaaattataggttctttatttctcattgttttatgtgcactcattctgttagctctgtaccaatctggcggatgtgttgtgatcgctatattcctaagttctgtgtacacgttattattgatgtcctgtgtggctatagttgtatacgttctttgtaagataaacgcacattggaatccagatgaactttatcttgtaattgctatccgaggaaatatgtcttacagacgattaaaacaagtacatttttttcttttaggaatggctttttcaggttttgtgtattcgaatatttatttaatattaaatatgtaatttatatttaaaaacggaatgatgaataatagtcttgctgtaagatttccaaaagattttagcttttgatattcagaaaattgctcagatgaaaaacagagaagatccatgaaacaagactagagtaaacagttccgtatttttaattgcgatagcttattattactctttataggatcgtgtccggctcaggcagcctcgtcccgtccgtgcagtggtccagcgagatgaaagacgaagaactcgccctggtctattacaattaacgttattacaccctccgctgatggaaggtggattaactgggatcagctaaaagaagaaaattttttagaaatatatttgaaaaatgagttaaaaagcagaatatttcttttgaattacccaatctgtatattttttgtcgtaactcacctattacaggggcggatgtattaggactttgggaagtaggttcgaggccacctaaaataaataccgtagttactgatggtaaaggcgatttagaagtctatctgggacaagctccggaaggaagtgtagataggaaatgttgtctgaattgcttaatgaaacatgaacaaagccatttgagcgacatccttgctgccaatccaagaatagcatttgatgacaaagggaaaccttatccggcaggaagaggaattgtcagtccagctcatgggcgagaattgatagaatctgagataaaagcgcatggaatagaaataaagtgtttacgagaatctctcacaaaaccgaaaataagtaagacatgcagaaagagaattgctacaagaattaattttttatctcaacgtttaaaagcatacgagaacaagttaaaatgactatgattgcaagaattattttattatccataatacttattgttcctaatataaaagcctctcctatattggttgacacaacgaaatcattggttctttctaaaaagagtccatacgtggaattagaaataatcgaaagagaaaatttatttgaattttatacagttgtaaaaccaatgaacaagggagataaaattaattttcttgtctatcggtacgatgataaatctcaaaaaattacaaccatcataaatgttacaagcaaacatgagatccaaatatctttccctataaaaaaagatgatcttggaaaattgagctattgtgcaaccaatactccaaaaggtacattcggcggcataggatattttgaaaggaaaaacaaaaaagaacttgtttttcctgatagtgatacagtatacatcatcgaaaatatacgagattttcttaaaagagaataagcgttaaataaatatttagtttaaactaaaccgttttttaataatggatggaatattttgttttaatactatggtattggcaaataacggcatcgaacacgctggacaaccggaacatgctccactcgttgctgtggaatcctttggaaccagaagtcacgcgttccctggctttggtgcaggacaatgtcctttacaacttcaacaagaacgtcacagatgttttcgatgggcggtagctattgcggcagtttaggactattcgccgtgtggaatagtcagcagtacaggaagtcttctctatctggtgtagtggtctagagaaatgaacgatggcaaattggctctggtctattacaactaccgttattacaatcccgcagacggcagatggatcaatcgcgatcccatcgccgaagaagggggatggaatttatatgggtttattagtaataacgcaataaataagggggacaagaatggcttaagatttgacctgcctattcctcatccggaatttcctaccctaacaagtcccttactccagatgagttggcatcagtattttgtaactattctatacctgcaccaaaatgcacatgccaaaattcatcaaagatttttgatccttatccggccaaggcaaagtccatatgtattaattttttgaagagataccaattttcaattgcagtcatttcgatagccctttgcttggtaaatgctgaaaagcagtgtcaagacgtctcgtattgttcagaaagaaacaactgtaggctaaaagccatgtgacttgttatgccagccgaggctttattccttttttgggacttccggaaggaggttctgatattggttggaatatgttacttaatgattctcaatgcaactaatatacaacataattcatatcatattaatttgcggggttgctccttggcttattggcgccgggcattccatgtgtttatctaattttcaccatgccgtcatggctggattttcaatgattgtattttcatttccagtaacatttatattggctgtaattggctgggtaatcttgcgtattttctctagtgaaataaatcaactggtagcttgttttttaggactgattatcggactcgttatgggcgctatgctggaccgtatcttatgcgatgaacatcattatttttttatattgtcaggagcggttggattaatggcaggatatattgaattttatctatttaaattatataatgatgaaatagaggaatagttctattacattcgccatccaaattaagaggtgttgtgtggataaacagaatatcctttccattaaattaagaagccgaaagaagaaactactgccatcgaggaatgtagttattaactacgtggaacagaaacgtccgcgccgacagcttcacttataatgccagaagtgaactcactagagccgccttgggaacagtcgcgtcaacatcggcaatcgcaagacggcgcgggaaatagcggaagaactcacttacgtggtcaacgaactcaaccagtacacccgcatggaagaaagtggggaaacgccctttgtgctgcaatatgacgcttcaggcaaccaaaaaacattgatcaagactgcaacgggcgtgtggacagctgtgtacaacgcagccaaccgtgcggtaagcttcaccagcgagggcgacgcatagtagtggaatgcgggtacaactccatgggacgccgctacatgaagaaagtcaccgtcaacgggacggtcgccagccatgaactctacctgtaccgtggctacctgcaactagcggtgttggacatgctggacaactggaacgtgcttcggacactgttgtgggatcccctggaaccggtggctacgcgtcccctggccctggtgcaggccgcctctctttactgctatggaacggacttcaacaagaatgtgacggaagtttttgatgggcagggaacgatcgcggcaacttacgactactccccctatgggatagttggcagcacaggaaacctcgtccagccggtgcaatggtccagcgaaatgaacgatggcaaattggctctgggtctattacaactactgttattacaatcctgcagacggcaggtgaattaacaggcatccgctaaaggaagagaattttttagaaatatatttgaaaaagactgtccggtaaaagtcgtttttgctgtagcaggattctatctgtttgttactgtacggcaggggctttctgagcttccggtacgggcaggggcgttctctggatggtgacgggcgttcctacgctggtttgcttgtagagaatttccgcaacgttccgcggcaggcgcacgcagccatgggagatggggtggcgccgtaccttccccacatgcagccccaggcccgcattggtaagccgctgccagtagggcatgggggaaccgtcaaagcggcctccctccggaacggggtccgtggattcggcgttatagttgatgcatttgccttccgcatcatacatcttgccgtaaaggttggaggcgtggtcttcctttttggagatgacggtgtagtctcccgttttggtcgggtaggccttgacgccggaggagaggggaaagtccatggcgatcaggccgtccaccaggtactggccccgctgctcgtccaggcagacgaagattttacgggatttcttcggcttgcggttcagcagggtatcatccttgtagacgtcatacgttttccggtagtccttgcgggctacaaagtgggcatacgtggagggatggaacgggtttttatactccgggacggatttgtccacagcgcgcggatccggcagggccgtatggcccttgccggagtgggtgcaggacgtccaccccatgagaaccacggggaggacggccagaagaaagagatgcttcataagcggtgaaaccgggaagggccccccggattacttggaacgcggaatcgtgagcttctggttgatgtgaatcatgtcggacttgaggccgttggctctcttcagcgccttgacggaggtgccgttcctgcgggcgatggctcccagcgtatcgccctttttcacggtgtaggtgcgtgccttgggagcgggcttgcgcgtggtgctctttctggcgctcgtgctgcgggaggatttgctgctggccgtggttttccgcgtgggggatttcttgctgacggaaggcttggcgggcggattataggcgtaactggaagagctggaggagctcttcaccgggctgtaatggccggattcataagcgggatcagagctttccgcaatccacggcgggatttcgccgctggccggttccgcagtgtcatagccggccgtggaggaattctgggtggagcaggaagagaaggggagcaccagcgcggcagcgcaggcgcaggtaaaaatgaatggcgctttcatgtgtgccctgttcatactaatttatgatttcggtttcaaggcgctagcgcggattgccgggattttttttcagcccttgtccagattataaaaggtttccgcattttgcgtcgttgcgcgggccagctcatccagttccatgcctctggaagcggcgatgaaacgggccgtatggatgaggtgggcgggttcgttcatgcggccccggaggggttccgggctgaggtagggggagtccgtttccagcatgatgcggtcttccgggcaccagcgcgcggtttccgccaccacgggggcgtttttaaaggtggccaccccggtgaaggagaccatgccgtccagttcgtcaaaaattcgagcggcctgggccgtgtctccgatgaagcagtggaacacggggcgcacgcggcccgcgtgattccgggcaatcgccagggcgtcttcaaagcttctggaccctttccggtcccgcgtgtgcaggacaatgttgaggcccaggcgcgccgccaggtcaaagtgctgttccagcaggttctgctgaaggcgtcggaagctgtcaggctcccagccccggggggctccgtggaagtagtccagccccgtttccccgatggcggccagggggatatcctgcgccatgcgggaaagacggtccgcccagccctccggcgcttcatgggcgtcgtccggatggatgcccagcgcgcaaaagaccacgcccgggaactggcgcgcccacgccgtgttcgcctcccagtcatccgggcgggctcccagcgtaatcatgcggtcgatgtcttcccggagggcatgctccacataggcttcccggcgggactggtcgaattgcgcggaagccagatggcagtgcgtgtcaataatcatggcgtaaaaaccctggcagggcaggggaagtctgtggatatttcccggttttgaaaagtgcaaacacagggcatgcctgatttttccttgccacgcggaagtgaaacgcacaaactgccgcgcatgaaatgtacggctttgtgcatgtgcgccggcctgttgtcggcggtttcccttcaggcaggaacccagcagatagaagcgccgcaggagggccctgtcatcagtttccatctggaaaacgacatgttcgtgggagatgacgataattataccaacggcgtccgctttgcctggatgtccggcaccacatcccggagccactccttttccggcatgctgggaacagtgctggggggcacgaacgcttccgcttcctggcggcggttcatgggcatgaacggttcccccaacctccgccagcagtgggggctggacctgacccagctcatgtacactccggagcagaaggctacctaccccatttataaccagcatccctacgtgggcaacctgacgctgggcctgacctccctggtcaagaatgaagacagggccaattccctggagctgcaattgggcaccacgggcacgaattccctggcgaaaggctcccagcatttcattcataagctgtggggcatggaacaatggcccggctggtccaaccagctccccggggaaatgacggccaatctgtttttcaagcgctactaccgcctgcgcggcctggaaaagcgctacagttccggctttgaaacggacgccctggcgtactggcacgcggatgccggcacggtgaaggtgcaggcgggcggcggcatgtccttccgctttggctataatctgggcaatacttcccctgaaaacagcatccgcggggccaccagcgccgcgccgcccttcgtttacaacaggacgaacgtcgccaactgggggtattacggctatcttcacgccgccgtgcgcgccgtggcccatgacctgtacctggacggcacggtgttccgctcctctccggagtacgtgaacaagtatcccgtggtgggggaatggggttacggcttcggcctccggtacaagcgcacggaactgctgttcggcctgcactacatcaccaaggagtacacgcagcaggaatccatgcagtgcgtgggcgtcctccagttaaagcatactttttaacggctgcgttcttcgcaggcggttcataaacgcaacggcagcttgcaaaggtgaagtttgctgttagaattagaattgcggattcgtatgtaacaggacaatccgtttttgcataccaacgttgacacatacttacttcatgagaacgaccagatcctggcttttatcctgtaccgcgctggcggtaggctccgccatgtgcggcctgggagccccgggcgattcctcccccgcgcccgcccccacagggctggaatgggaacaggaacagaacctgcatttgaacaaggaggcccccacggccttttttgcgtctttcagcgatttgcagtccgccctgaaagtgctgcctgaaaacagcaagtggcgcaagtccctgaacggccagtggaagttccactgggccaaggatccccagagccgcccggccgatttttacaagccggattacgacgtgaaggactggaaggaaatcaaggtgcccgcctcctggcagacgcagggctacggcacccccatttattccaaccagccgtacccctttgaacgctcctggccctatgtgatgaaggagccctccaacaagaattacacgtcctacaaggaacggaatcccgtaggctcctaccgccgcacgtttgaagtgcccgcggactgggacggcagggaggtgtacatgcagtttgacggcgtggattccttcttctacctctggatcaacgggcagtacgtgggcttttccaaggattcccgcaatccggcccgctttgacatcagcccctacctcaagaagggggagaacgtggtggccgcggaggtgtaccgccattccgacggcgcgtacctggaatgccaggacatgttccgcctgtccggcattttccgcaacgtctccatttttgcggtgcccaaggtccacatccgcgactttttcgcgcagaccaacccggtggaccagcgggactgggccctgaacattgatcatgccaagcccggcaccatgaacggggactggcgcctccaggtggacgtggacgtgcgcaacctgttcccggcgaccgagaagctggaagggtgtaccgtatccatggccctgtatgacgcttccggcaagctggtggagcccgtcaagcccaaggacgccccgtatgacggcgtgctggaaaagcccctgcgcatcaccggcatgaaggatttcaaaacttccctgctgggcatttacgccaagcccaaactgtggtccgcggaggaccccaacctgtacacgctggtgctgacgctgaagcgtgacggcaagacggaggagatggtttcctcccgcgtgggcttccgcaacgtggtgattaaggacagcgtgttcctggtgaacggccagccggtcaaggtgaagggcgtgaaccgccatgaaagccacccggaaaccgggcactacgtgactccggaacagatggaggaggaagtgcagatgatgaaacgcgccaatatcaaccatgtgcgctgctcccattatcccgcggacccctatttctactacctctgcgacaagtacggcatttacgtgcaggatgaggccaacatcgagtcccacggctactattacggcaaggagtccctttcccaccccatcgaatggatgccggcccacgtggaccgcatcatggcgatggtggagcgcaacaagaaccaccccagcgtgatcatgtggtccctggggaatgaggcagggcccggccagaatttccgcagcgcggaaaagatcgtgaaggccagggacatgtcccgccccacccactatgagcgcaacaacgacatcgtggacctgggttccaaccagtacccctccgtggactggacgcgctccatggcggccaacaagaacttcccgaagccctactacatttcagagtacgcgcacaacatgatgaacgccatgggcaacctggcggactactgggaggctattgaatcttccgaccgcatcatgggcggcgccatctgggactgggtggaccagggcctgtacaagaccctgccgaacggggagaggatgctcgcctacggcggcgacttcaacgaccatcccaacagcggccagttcgtattcaacggcaccatcctggcggaccgcacgccggaaccgggctactttgaagtgaagcacgtttatcagaatatctccacgtccctgacggacgacggcaggatttccatcttcaacaagaacttctttacggacctgtctccgtacgacatcacctggactctgacggagaacgggaatgtggtggcggaaggcaagctggatacgccgccggccggaccccgggaaaagatcgtggtgcccgtaccggacattccgcagctgaaaaaccgtaagccgggagcggaatacgccctgcgcataggctacaagctgaagaaggacaaggactgggccaagaagggctatgaactggcctttgaccagctccaacttcccgtgcagggagacctgcccatgttcaaggctcctgccggcaaggtaaccctcagcgcggacaagcacaccgtgtccggcaaggatttctccgttcagtttgacgcggccaccggggaactggcccagttcaccgtgaacggcaagcccctgttcaagacgcccatggcggtgaacgccctgcgcgccgcttccagcaatgagccgggcgtcatggccaagagcatggccaacggcctccgtgagctgaagcatgaactgctcagttatgaagccgtggacaacggcagcagcgtcaccgtcaagcagtccgtcaaggtaaacggcaagcagactgaaaacatcagcggctatggagacaccaagacctccatcacgcccaaaaagcagcccctgaatgacacgaacacccatttcatcaacaatctggaatggactatctacccggatggaaccgtcgtctgccagtccgtgctgctgccgcgcggcaatcccctggagctgctgcgcctggggtatgaactccagttgccggcgaacatgggcaacgtgacctactacggccgtgggccggaggaaaactatgcggaccgcaagagcggcatgcctctgggcgtgtacaagacgacggcccgggattccttcttcccgtacggcaggccgcaggactgcggcaaccatgaagacacccgctgggtggccgtcacagatgacaaggggcagggcctgctcttcggttccgtgggcgctccgtttgccttctcagccattccctacaccacgacggacctgattctggccaaccaccccgtggagctgcccaagacgacggacaaaaccgtgctggtcctctcctccgccacgcgcggcctggggggcgcctcctgcggccccggccccatgagcagggacatcatcaaggccaacaagccctacccgctgtccttcttcatgcgtcccgtcacctccaagtcctacaagggtgaaatccgcgtgcccgcggcccagctggacatgaccatgctgacccgtacggacaagtacacggtcaagagcgtgaccagccaggagcagggcgaggcggatgccgagttcgccattgacggggaccccggcaccttctggcactccgagtacaacaagaccgtgaccaagcacccgcacgtgctggccgtggacctgggcaaggagcgggagttctccggcattacctacctgccccgccaggacggaagcggtaacggccgcgtgaaggattattccgtggaagtgagcacggacggtgaaaaatggcagcctgccgccaagggcgccttcccggacagcgcggatcttcaggaagtgaagttccaggcgcccgtcaaggcgcgctatttccgcttctccgccctcagtgagacgcagggacgggattacgccgccgtagcggagctggatatcattcccgttaaaaagtaactcctgcggtttccaccgcttgaacagacgccccgccgctcttcggagtgcgcggggcgttttatttgccgcaatgccgtttggagcctggttggagcgccgcaagcccttgcgccaactaaagatgaacctgggcgccagcgggcgcgttttctgaaaaccagtgcggctgccagccgcatgatgaatcggttgccgcagaggctcgcggtgctcctccggcggagggatgtgatgaaggagggcctggagtgcggctgccgtctgcctgcaaaaaagcctccgcacaggcattcccgtgcggaggctttaacagtgggaaaagctcttttagcgccgtctgcgcatcatcagcgccgccaggccgaggaggctcagcgtagcggtggcgggttcgggaaccagattgaagttgtcgttaaagagagggatggcataccactcataaccctcggtaatggcatccgcctgcgacccgaagaaaaacgtcatgtcgtttcccaccactcccgggtacttggccagttcgcccgtatccacgttccggaacgtaaacatggagaattcgccgggagaatcgtcgttgttgaccaggaggacaatgggctttccttccagaccggaggccagcgtgccggaaagtgaaaactggccgccattggtgatggcgccgggatattccggagaaacggcggaaaggctggtggtgaagctttgcctgatttccgccatttggctgtagctcaactggcctgcgggcgtgctgtttttggaccattcaatcttgccgtcaaccaggtcgaaagaccaggtactgtcttgaaggtatccgagcatggcggagccgttttgcagggaatggccggaagcgtcaagaatggacgtaataggggcagtcccatattcgtcttcattgtaaacggtgagcgtcgtggcagaggctgctcccgcgatcatcagtccggcggctgcgtacagcaggaaggaatgtttcatcatggtatcactacttgttaagttgttattgaggagtaggtaatgtattggtctggacagttgtgtaagcgggaagcctggtgacggaaaggatgttcaggatgccttccaccgccgtggaggatacgttttcacccgtgtccctgtttttccactgtccggaggaagaatcataataacagggctccagagggccgccgggtgtgagaggcacgtaaaccacgtcactggaaggatcgggcagggcggtgtggagggaggtgctgagaagcgtctggggaacaggcagccccgtatgaaggagcgtgctttcctgggagagctggagcctctggtgcttctgcgccacttccccgataacgaaggcctgcacgccattgccggctttccggacgattttaaggggttcatgattgaagacggggagaaggcccatgtcgtcccgggaaccgcggcgcatccatttgttttccgtagcggagtggtaaaccggaatctggatggagggggaggtggagatataaacggcatccgccgtgccggaagtgccgcttttcaggctgaacgtattgtcgcctcccagaacatcgttcagggtgcgcgccttgcgcagcacgtaggaaaccggcttgctgtttttaatcaggtccgctgcgcttttgtcatccaccgttattttattcgccgtccaggaaggggcgggctttttccacgcgtccctgttgaggggaagggccatcgcctcgtctccgaaaatgagttccagaacataggcggaatccgtctccatcaggtcggtaaaattgacgtccggatccgtgatggtgattttgctgccggaaacggtgatgttgttttcctcaagcgtatgctgcatcagggcttccggatgcactcccaggcccagatagcccgttgttttggcattcagatccgtctggatgtagccgcagggcgtgctgtacgctgtttccgcatgcagggaggcggctgttgccgacaacaacacgcatgtgaagagggccgctggcagacaatataccggattcataaacattaaatcattaagaggaaagggcatggtttgtcaattaagaaaggaaaaaacgttccgattttttaattttatttgttagacggtcttttgcgaacgcagaaaaacaaggggattcctgcggttggccgcggacacggcaagagcggaatttaccgggttcaagtgcgtttccggcattttccgcttttagtgcggagtgcagtccatccggaaaaaatggcggcatggcatccggttccttctccaatatcggaaaaggatgggctgagggaaaaaggcttttttccccttgccggaagattcccggtgccgcgtgcttgttttgcccttaaagcgggctttccccttcacgggaaattttcaggcgcaggaatctccgccggggactttccgcgttcatgggcacggcatcccggaaagtggcggagcttttgccttccgttttcacttccgccgtctccgtccaggtctggaggtcttccgaggcttccactgcgtgcctgattccggtggcttccgggttgacgggccagcccagtaccaggcaggcgtctccgcccgcttcctccgcggtgacctgcacgacgctaccgcagggtttgaggggatccaatcctgtggcgtatttcaacaggttggggatgccgtccccggccggggaatcattggggcctgtctggtccgtgtccgggtcccgggaggtgatttcatcctccttccattcattccacgtgcgtttctgcccccgctgagtcacggtggcggagcggacggttccaaaggaggaaaaggaaagctgcgccgtacgggagccttccgtggcattggcctctgcggcaatggatacggtaccattgcctgtatccgctccctgcatgccggtgatgtttatccagtcccccgttttggagacattccaggcggcgtcgcaggtgacggagaagaccgccgttcccccgtttttgggaagcaccagcgcagcgggggaaaccgccagcgcaggggccctgccggactggatgacagtgacggagaccggctggacgccaggaacggcaaccgtgatggttccggtgcgttcgcccgcgccttcccagcggtccacgctgtaggtgacggagccgtttccggagccggaagagggagagacggtgatccagccagcggaagaggacgccgtccaggaatcgtcgctggagacggtgaacgtggctgccgtcatgccttccggtcccacgcggacgggcgccccggcggcgggaacgtccagggaaggaaggaattcatcatacggaatgcgcaggaagaagatgttttcgtccccgttgagcccttcatacagcacgccgatgtggccgtctcccgtttcacagatgtcggaatagccgcagcaggggcgggaatcgtaaagaacctggcggctggagggccatgtggcgccttcgtcaaaggaggctttgagggtcattcgggcgcggggggcggaagttttatcagggttggagaaaaggagggccctgctgatgttcgcggagttttccacggcgagctggctggcctggcaggcggcgggctccggcagggctttcaggttggtggcatgagccgtccacgtcttccccatgtcgtccgtcgtgaagaccttacggtacccgctcctgctttcattgcgggcgttgagcatcaggcgcccgtcgctgagctccgtgactgcgcattcgctggagccggctccgatgccgggcgtgccggatttgccggtgtcctcgctgatccaggtctggccgcggtccagagaataaatgatgcaggactggggtgttcccgcgccgctggcgcccgtccatatctgggaaggaaagacaatggggcgcacgccgttgaccgtcttcttcatcgtaatgccgtggcccggaccctggaaaaaggatttccaggccctgttcttgatgtccttgttgatgctccggggtttcatttttacgaactcccccgtgccggggtccgcggaaccccatgtccggccgttgtccgtgctgtacgctaccacatactgggcggtttccaggctttccacgtccacgttggccttggaggaggccagcccgtgcctggcgatgcctgccacccacagggtaccgttgacttcatccagaaggatgcaggggtcgctgacgccgtagccggaatggtagtcgttggcggaatcgcccgtggggttgaagttgacggccacgttgacgggcgtccaggtgcgtccgttgtccgtggaacggctgcatcccgtatcgatgttggcctgcatgtcgttccggccgtcgtagcggatgtcgaaaacggagaccagatccccgtttctggcgcgcacgatgcccggaatgcggaatttcctggaggcctttccttccaaggggcctccgtaaaccggatcgttcgccttggcgacggcatagcctatccgctgcctggccgtcactccatcggcaacatcagtcgtttgcccgtccacggtgacggaggtgattctggcgcccaccttgtggtccatgctggcggagttcttgagcttgacgctgacccagaagtagtattgccgtccgttcgtgagaacccccggagtgacggggaacgtcatgacgggagccggcggctgggccgggctggcaaggacgcccgtggtgctcatggcgccgtggccgctgctgccgtaggcgggcgcggaatagatgccgtccgcgtcaccggtgtaaagggaaacgctttcaatgtcacccaggtcgtcggacgggctcatgtccaccgtgacggccatgccgtcatacgcagcggggagttccgtcagggaaaagcggaggatgccgttggcctccatgcggatcatggccggccatgcttccgcggtgctggagagggggttgaattcggaaaagaccagatcgtcgaaaagaacgcccttattggcgggggcctcgcagcggaagatgaggcgcgcggtgccggaagggatggcgcccctcacctgctgggtcatgggattgctgcccgttttcagggaggagccgtccgcgaccagtgtttcattcccttccccgtctgcggcgtggatggtgaaggaaaaggggctgtcggacgtccagcgttccccggtcagggcaagcgtctttttgacggcgaggggagcgggcagcgtcagcgtggccgtgcttttcgtcccggtgcccaggccgatgagccgcatgcagttgggctgggaggaacagcggttgctggcgatggcggcatgcccgctttccgccgtcatggtccccagagcggtttccagggaggtgaagctgcccgtcggaaaggagtcgaagttttcagaagcggcttcctccgctccccgcgccagggcggttcccaggagcaggagaaacaggactgcggaagaggcgacggtgcggagaatagtctggaaggcgttcattgtgaaaaggaaagaggaaaatttaaaaatgcttgataacgaaaagagggaagaatggaaacaaaaatggggaaggggggtggaatttaataaaattttaacgttttttctggtctgttttatttgcaccttgaacggtcttctattaggttaattctaacattcaagccggataccattacggttcccttttttcatgttttcagaaacgcattcggacagccagcgggcagacaggattctggcctccatccggagggaggaatcccgccccggccgcggcctgctgaaaatcttcttcggcatggcgccgggagtgggcaagacgtacgccatgctggaggccgccatccaggcggcgggcaagggcgtgcaggtcatgatcggcgtggcggaatcccatggccgggaggatacgatgcgccttatcggcaggctgccgcgccttcccatgaagaaaatggcttaccggggcgtgcagatggaggagttcgacctggaggaggcgctgcgcgtgaagccccagctcattctggtggacgagctggcgcatacgaacgttcccggaatgcgtcacaggaagcgctaccaggatgtggaggatttgctggccgcagggatagacgtttacaccacgctgaacgtgcagcatctggaaagccgttccgataccgttcatgacattaccgccgctcccgtacaggaaaccgtgccggattccgtgctggcggaggcggactgcatccagttggtggacatcacgccggagcagttgcggacgcgtcttcaggaagggaaggtatacagcgctccccaggcttccgccgcgctgaaccattttttcaaggagtccaaccttacggccctccgggaactggccctgcgcatcatggcggagaaggtggaccatgagctgacggaggtgcgcaccatctccggggaccgctccatctggcgcagcggggaacggctgatggtagccgtggggcccagcccgttttccgcccggctggtgcgctggacgcggcgcatggcttacgccctgaacgctccgtggattgccctttccgtggatacgggcgtgccgctgtcccccgaacagcagcagcggctggacgccaacctggagctggcgcggcggctgggtgcggaagtgatcgtgatgcccggttccgacctggcggagacgctgctccgcatggcctttttgagaaatgtcagccagattgtggtgggcaagccgcaggaggcttacctgtgggggctggtgcggcccatgtccctggtggacaaactggtaaaggggagcgaccagattgacatttacgtagttcccgccgctcccggtccggtccggaaccggtggaagagctggcaccgggaaacggaaaaatatggccgggactactggctggccgcaggcgtgacggcggccgttacgggaatcggcctgttgatttccgcgtttaccggttatttcgctcccggcttcctgtatctggcgggagtagtgggcctgggctttttcatccgttcccgctgggccatgctgatggccgctgcgctgagcgccctgctgtggaacctgctgttcattcccccggtgatgacgttcaagatagaacggctggaggatgccctgatgtgccttttcttctttctggtggctctctccacggggcggctcacttcccgcctgagggtccgcgagcaggaggagcgggaacgggaaaaaaagacgaatgccctgttcctgtattcgcgggccattgggtccgcctcggacgtgccttccctgatttccgtcgccgcagggcagatcagccagatcatgggggtgcgcctggcggtcatgacgccggaaggcagcggccgcaggctgaagctttgggaatccgggggggctttttccatggatgacaaggaatggagcgtggctgcctggtgcctggagcaccgccggcccgcaggcaggtttacggatacgctcccggtggcggaagggttttacctccccatgatgtccggggaacgctgcatgggcgtgctgggcgtgaggccggaggaaggggagcgccttacggcagggcagaaggatttgctggaaagcatgggcgcgcagctggccatggcgctggaacgtgaagaactgcgggcggaacgggcgcgtacgcggctcatggaggaatccggaaaactgcaccgctccctgctggacagcgtttcccatgagttcaagacgcctctggccgtgattgagggcggctgtgagaagctggccgggcgcgccgcgtccgcgccggaggaacgggaggagtatggggaaatcctgctggccgcacgccgcctgcgccgcctggtgaaaaatttgctggacgtgagccgcctggaatccggcgctctgaagcccaaactggactggtgcgacctgggggatgtgattgaaggggctctggccgccaccagggaggcgcgccgggaccatcccgtgtctgtcgccctgccgccggattatccgctggtgaaggcggatttctccctgatggagcaggtgctggtcaatctgctgctgaatgcctgcgtgcatactcctgcgggaacccccattacgctgaagggcggcgccgatcccgtgcgcggccaggtctggctggatgtccatgacctggggccgggcattccccccgaacgggcggaaaccatttttgagcgtttccggacgacgcggcccggcggcctgggcctggggctttccatcgtgcgcggtttcatggaggcgcagcggggagccgttaccctggttgccgttcccgccggaacctgtttccgtcttgtccttcccctggtggagcatgatcatgttcctgaagaataaaccttccttccccgtgttatgagcgaccttcccgcagatatcctggttattgatgacgaacggcagatacgccgtctcctgaacctgacgctgaccggcgcaggctaccatgtccgcgagtgtgaaaacgggcagctcggcctgagcgagaccgctctgaaacggccggacgccattattctggacctgggccttccggacatcaacggactggaagtgctcaaacagctccgggaatggacgcaggttcccattctgatcctgacggcctgggacagggaggatgagaaggtggacgccctggacgccggggcggacgattacctgaccaagccgttcagcggccgggaactgctggcgcgcctgcgcgtgatgctgcggcgcaaccggccggacagggagccctccgtattccggctgggatccatcattgtggacctgagctcccggcgcgtggagaaggggaaggaggaaatccatctgacctccaaggaatacggcattctgcgccttctgctgctccatcagggcaaggtgatgacccaccgccagcttctccgtgaaatctggggcccccagcatgaggaagatacgcactacctgcgggtgcacatcgcccacctgcgccagaagctgggggattccgatccggaaaaccgcatcatccgcgcggaatccggcctggggtacagaattgtggcggacggagctgaataaatctttttcccatttccgcgggccgggaaaggctgtggccttccacccgtggaagccgggaaatatattttttcataacggttgcagggcatggcttaacttcacgaaggtcaatatgctgtgtaggattcaggacgtattcgatacgtctttatgaagattacacacaccgcaaaaaacataggggccgcagttctgggctgcgccatgatggcaggaaccgcctgcatgggcggggaaacggcctctccctcctctccctccctggccaacgcgcaggaggccgccatcccttctacggacacggactgggctttctccctttccgcgggctggtccagcaaatacgtgacggaagggctggactgcctgccgggcagcggcatctgggaagtggctccgagcatctcctggaaagaccttacgctcagcgcctggtacgccgggggggattcctccaattatgacgagctggacctggttctgggttacgcctggaagctggggaagtggaccgtcaatccctggtatgagcaccagttctacttcacgcaggactacaacgtagccaatccggccctgaccgtctcctatgccgtgacggactggctgaccgtgggggcggaaacccaggtgaaggtggaacaccaggattttgaagcctattacagcgcctttgtgcaactggaatggtcccccgtggagaacgtgacggtaacgcccatggccaggtacgggtacaacggcggttataacgtggactatgacgacggctccaactgcattgactggagcctgggcgtgacgtggcggtttgcggaacattattccctttccggctccgtcaattattcccaggcggctacggtgctgcgccgcagggacgccggggacgagttctgggtgggcttccgcctgggcgtggaattctaacggcgtactggcgtcatgaaaaacgggcttccggagggaaattaacaatttcttaatgtccggcagccccttgttaactacccggaatttccggaacatgtataaagttgcgttatgtcctcacacgacttgttaatcattgtcctattcataggcatactggtcgccttcactccgttgctcgggaagtggctggcgaatgttttacagggaaagcggagctggctttccccggttcttggtcccgtggagcgctgcacctaccgtgtggccggcgtggacccctcccgcgaaatggactggaaaaagtatctgacggccgttcttctgttcaacgccgccggattcctcatcctgttcctttccctgctgtgccagaaatggctgccgctgaatcccgccggcacggaaaacatgcggtgggacattgccctgaatacggccatcagcttcatgaccaacacgaactggcagttctactccggcgaagggccggaaggcatcagctactttgtccagatgaccgggctgggcgtgcagaacttcgtcagcgccgccacggggattgccgtcatggccgccctgatccgcggtctgaaaaggaaatgcgcctccactctgggcaacttctgggcggacctgacgcgcagtaccttgtactttctgattccgatttccgtggtcgtcgcgcttctgctggtctcccagggggtggtgcagtcctttgacggacccgccaccgtaccgggcatggacggcgtggagcaggtgattcccaacggtccggcggcctcccaggtggccatcaagcagcttgggacgaacggcggcggcttcttcgggaacaacagcacgcacccctttgaaaaccccacgccgttcagcaacatgattgaaatgctctccctgctcctgatcggctgcgcctgcccgtacgcctacggcgtgatgatcgggaaaaaaaggcagggctggatcatcttcggcgccatgatgcttctgcttgtgacgaccatcgggctttcccagtgggcggaacacacggggaacccgctgttccccggcatggaaatgctggaaggcaaggaagtgcgcctgggcgtgacgaacagctccctctggtccgtggctacgacggcctcctccaacggctccgtgaactgcatgcactgcagcatgtccccactgggcggcggcattgccctgttcaacatgctgctgggtgaagtgatcttcggcggcctgggctgcggcctgtacggcatgctgatgttcgccatgatcactgtcttcctgtgcgggctgatggtggggcgtactcccgaattcctgggcaaaaaaattgaagcgcgggaagtgcgctggtccatggtgggcgttctgctgcccggcataaccgtcctgcttatgagcggactggccgccgctacggaagtggggcgtgaatccatctgcaatgccggaccccacgggctgacggaaatcctgtactgcttcggttcccaggccgggaacaacgggagcgcctttgccggcctggctgtgggggatacgcctttctattccgtgctgggcggcctggcgatgctgctggcccgcttcggagccatcattccggtgatgatcattgcgggcagcatggtatccaagaaaaccgcgcctccggcccagggcaccatggcgacggacaacctgatgttcatggttctgctggtggccgtggtgctgattgtaggcgccctcaccttcttcccggccctggccctggggcccattctggagcatctgctcctgtattcgggaaccatgctgtaaggagcattcaccaacaaaccagattttatgatgatgaaagaagaaaaaaagaatcaatcctggtgtaacggggccatgctgaaaacggccttccgggacgcgctgcgcaaatttgacccgcgtgctttatccaaaaacttcgtgatattcgtcacggccatcggtgccctggttgctacggtcgtccttatccgggatgccgccgccgggcagcctttcggctttaccctgcaagtcacactctggctctggttcaccgtcctgttcgccaactttgcggaagcattggcggaaggccgtggaaaggcccaggcggacgctctgaaaaaaatgcgcgtctatgtgaacgcccgtctgctgacggacaaggggacggaggaaatagtctccgtttccgagctgcgcaaggggcaaaaagtgctgtgcgaggccggggacatcattcctcttgacggcgaggtgattgaaggcatcgccagcgtggacgaatccgccattaccggggaatccgccccggtcatccgtgaaagcgggggagaccgcagcgccgtaacggggggcacccgcgtgatcagcgacggcatcgtcatccgcatcacggcggaaccgggcaataccttcctggaccgcatgatcgccatggtggagggcgccagccggcagaagacgcccaatgaaatcgcgctgggcatcctgctcgtggcgctgaccatcgtcttcattgccgtagtgctttccctcccagccatggccggatacattgaagattccgcccgggcgctgggcttcagggcggacggccatatctccctgcccgttctggtctccctgctggtgtgcctgattccgacgacgatcggcggcctgctgagcgccatcggcatcagcggcattgaccggctggtgcgccggaacgtgctggctacgtccggccgtgccgtggaagcggccggggacattgatgtgctgatgctggacaagaccggaaccatcaccttcggcaaccgcatggcgaatgaattcctgcctgcgcccggcgtggaggaccagcagctggcggaagccgcccagctcgcctccctgtccgatgaaacgccggaagggcgtagcatcgtagtgctggccaaaaagcaatttggaatccggggccgccacatggacgcggaccacatcacctttgttccgttctccgcttccacccgcatgagcggcgtggacattgcggcgcacggcggccagccggccgtttccatccggaaaggcgctgcggaaagcgtggcgcagtgggtgaaggaccagggcggagccttcccgcaggaggtggaaatgaccgtgcagaacgtcgcgcgtgccggcggcacgccgctggtggtggcacggggaagggacgtgctgggcgtcatttacctgaaagacatcgtcaagggcggcattaaggaacgcttcgcccggctccgggccatgggcatccgcaccgtcatggtgacaggggacaatgccctgactgccgcatccattgcggcggaggccggagtggatgacttcattgcggaagccacgccggaaatgaagctggcgcgcatccgtgaagaacaggcggaaggccatctggtggccatgaccggggacggcaccaacgacgctcccgccctggcccaggccgatgtgggcgtggcgatgaacaccggcacgcaggccgcccgggaggcgggcaacatggtagacctggacagcaacccgaccaagctgattgaaatcgtggaaatcggcaagcaaatgctgatcacccgcggcgcgctgaccaccttctccttcgccaatgacgtggccaagtacttcgccatcatccccgccatgtttgcgggcctctttgtggctgacggcatggcccgggggccgctttccgccctgaacgtgatgggactgcactccccgcagagcgccatcctcagcgcggtgatcttcaacgccctcattatcgtggcgcttattccactggccttgaagggggtttcctaccgaccggcgggagcagcctccctgctgaagcgcaacatcctcatttacggggtaggcggcctgattgcgccgttcatcggcatcaagctcattgacatggccgtcaccgccctgcacctcgtctgaacaattaaaaatcaacctgctgaatcattatgaaatggacatttcccaatctgcgcctgtttctggcgctggccgtcgtcaccggcggcatttatcccctggctgtcacgcttgtcagcctgattctgttcccccatcaggcgcacggctccctgatccggaatgaacggggggaagtcatcgcctcggagctcatcgcccagcccttcacttccgccaggtacttctggcccaggccctccgccggggactacgccaccatgccttccggtgccagcaacctctcctggacctccggagaactggtcaggacggtggcggagcgcaaggcggccctgctgaaagcccacaacctgccgcaggaaacgcctgttccggcagatctcctgttcgcttctggaagcggtctggaatcctgcatttccccggaagcggcggaattccaggcggcccgcgtggcggcggcccgcaagctgccactggaaaaagtaaggcgattggtggcggaacacctcattccgggcggcatcctgggggaaaacgtaatcaacgtgatgacgctgaacgccgccctggatacattgccccccagttagtggtatatagttgaccgtcccggtccggggaataccctggcggaaaaatcgtccggcagttgtccggtgccttggttccgcatctttctccggtcgccggggcggattttatgaatgaaagggaggaactctcctccagaaccatggggctatcttttgccttccagaagaaacagggccgctccgtggggattgagccgcaccttcatttcccggcttgccgtgccggcgttttcctgcttccacaggtcgcgcgcgttttgcggagacttcagcttgaggcgggaaagggggacatgaatggtctggcctttattgcttttattgaaaaagccgacggcggtacggccttcccccagcggtttgatccatacttctccatcatcttgggacaggactttttccgaagggccgtgaaacgtctggttgacggcgatcacttcccggttgcacaggatgccccgcgtgaaatcgtccagatgctccagatcgcatgaaataatcaggggggcggatattatggcccagaaggacatctggaaatactgctcgtccggagtcagccgggtgggggagaatgtggtattcgcctttccgaccttgcccaggcggccgatttgaagcatgtccggatcattccagtgccccggtccggcatagggctgccatttctcctgggaggaagcgatcttcttcaaactgccccagtggtcttcgatatctcccgtcgtgcgccagacgttggccgttttgctgatggggccggcaatctcgaacggggtggaattggaaacgctcagcacaatatccctgccgctttttttcaaatccgccgcgattctttccgtgctgggcacgtcgatcaggtaccagtccatcttgacgtagtcaaacccccattccgcccactgcctggcatcctgggtaatcatccatacggggcctgttttggcggctcccagccgctgggaacccggacagctcccgaacaattgatcgggctgcgggcgtttgctttcaggaagggccagggaggaataatctccctgcggattgggggaagtgcctcccatgtagccggcgtaagttcccatccacggggttgagtaaatccccgctttcagtcccaggctgtggatttcacggcacatggacttcatatccggaaaacgcttgttgggctggatggcgcggtacttgccgcctctggcgccttgccagcaatcgtcaatgttgacatagcggtagccgtattgggccagcccggaactgatgagcagccgggcggttttcaggatattttcctggctcacgccgccgctgtaggaataccagctgctccagcccatggggggagtcaggcacatctccttcccgatgcggacagtgatggtcccgttcgctttgccgtggctgttgcttatctgcacgggaaaggcataagttcccggacggctgattttaccggtgatgacgccggtttccctgtccagcttcacgccggggggcaatttggcggcggcaaagctcatggggcgttctccgctggcgcagatggcgaactggatgggggagccgggacgtgcgccgaaaagccgcggttcgttcagcacgggagccggtgattccggcggtgtcaggcggacgccgggttccggagcgggatagggggaaggcatctccttgccggaggctcccgtttgaaccaggagcagggcggagcataggaacggaagaaaagaaagacggatcattttggtaaaaaactggagacaggaaaaaagaaaaggccggtaaaatgcgggttctgtaaaatacgccggatgcactacaatattacaaggaattcggagggtcaaaaaaatttggataacggcaaaaatcctgctttcccattcaacggttggagatattcttatgtctaaattaccaacataccatgcttaacaatctaacaacaaaatttcaggaagcgctgatgcaggcgcagcagacggcagggcggctcggaaagccggaaatttcctccctggacgttctggtggcgttgctggagcaggacggcggaattctttcccctattctccggaaggcctcttgtgatccgggcctgctgttgcaggccgcccagagggaagtatcccatgaacccacccagagcggtgctaccacgcagccccagatgggccgtgacctggctacggtgatgcacgctgccgaggatgaacgcaaaaagctcaaggatgactacctcagcgtggagcacttcatgctgggggctctggacacgcagaacaaggtgcaccagttgacggacacctttggactgaccaaggacaactatctggccgccatgaaggaagtgcgcggcaaccagcgcgtgacggacgacaacccggaaggcaaataccagacgctggaaaaatacggcacggacctgacggcccgcgcccgcgccggcaagattgaccccgttatcggccgtgatacggaaatccgccgcgtcctccagatcctttcccgccggaccaagaacaaccccgtgctcatcggggagcccggcgtgggcaagaccgccattgcagaaggcctggcgcggcgcattgtcaacggtgacgtgccggaaagcatgcgcaacaagcgcattgtgtccctcaacatcgggtccatgctcgcgggggccaaataccgcggcgaatttgaagaacgcttgaaatccttcctcaaggaagtgacggactccaacggcgaaatcatcctgttcattgacgaactgcacaccatcgtgggcgcgggcgccagtgaaggggcggtggacgcctccaacctgcttaagcccgctctggcccgtggcgaactgcggaccatcggcgcgacgacgctggacgaataccgcaaatacattgaaaaggatgcggccctggaacgacggtttcagcctgtcatggtgtctgaacccagcgtggaggacaccatcgccattctgcgcggcctgaaggaacgttatgaagttcaccacggcgtgcgcattacggacgccgccatcgtggctgccgccactctttccgaccgttatatctcagaccgtttcctgcctgacaaggcggtggacctggtggacgaagcagcggcccggctcaagattgagctggattccatgcccacggaaatcgaccagatcgaacgtgaagccatgcagcttgaaatggaacggcaggccctggtgaaggaagaggatgccgacagcaaggcgcgtctggaaaaaatcaccaaggatctggcggacctgaaggaaaaatccggctccatgattgccaagtggaaaagtgaaaaagacgttctggacgccgtccgcagggaacaggaaaaaatagaggccctcaagctggaaagcgaaagggccaagagaatgggggatctgacccgcgcttccgaaatcacgtacggtgaacttccggaagcggaacgcgccctgacggaaggcaaggaaaagctcaacaaaatgcagaaggaggacggaggcctgctcaaggaggaagtcacggaaggggacatcgccaaggtggtggccacctggaccggcattcccgccgcgcgcctgcaggaaggggagcgcgccaagctggtgcacatggaagaacgcctgggcgcccgcgtgatcgggcagaagcaggccgtcaaggccgtgtccgacgccgtgcggcgcgcccgcgcgggattgcaggatgaaaacagacccatcggctccttcctgttcctgggccccacgggcgtgggcaagacggagctcagcaaggcgctggcggaattcctctttgacaatgaaaacgccatcgtgcgcattgacatgtccgaatacatggaaaagcactccgtggcgcgcctcatcggggcgcctcccggatatgtgggttatgaagaaggcggccagctctctgaagccgtgcgccgccgtccgtactgcgtggtcctctttgatgaaattgaaaaagcccatccagacgtcttcaacgtgctgctccaggtattggatgacggccgcatcacggacggccaggggcgtacggtggacttccggaatactgtcatcatcatgacctccaacatcggcagccagtacatcctcaatgaatccaacgcggaacagcgggaagccaaggcgatggaagccctgcgcggccacttccgcccggaattcctgaaccgcattgatgaaatcatcatctttgaccgtctgacggcggaggaactcaaaggcattgtggacatccagctccagcgcgtccgcaagcgcctggaagccaagggcctgttcctgcgcatgactccggaggctacggccctggtggcggaccatggctttgaccccgtctatggagcgcgtcccctcaagcgggccattcagcatgacctgctggaccccctcagcctcaagctcctggagggcgacttcccggaagggacggaaatcgtggtgcgggaaaagggcggcaagctggactttaccaaggaaaagaaataactgaaaaggctgcttttccggtgtgccgccgggaaaaaccatgaagggcgttccctggcaggaacgcccttctgctaccaatccactccctggcggctaaaggaaactgccgtctggccggcgtgaaaggaaaatccgggagaggaaaccgtcagcagcggcgtcttcgtaaagcgagcacggccagccccagcagggaaagcgtggaggtgccgggctccggaaccatcttccagcccatggaacgcatcaattccatttctccatccgtcagggtacggtggtaggtatccggcgaaatggaatactgcatgagggcgtccggatcgctcgcgctgtcgatgtgggccatgctggacccttgctgccaggtggcggggttataggcggtgagccccgtatcgcccagggacagggtttctccaagtgtaaatgccgtattcccgtttccggccttattcacgatggattggccttcctggttggttaacagggaatcatacctggtgtacagcatggtgctgtaagctgctgaagcattcccggactggacctggaaggtaccggtttgtgtcgccagggaaagaaaccctgcggcatgccctatctcatgggtcaggatgctttgaaaatcatattttcccgtatgctccgccggtaaggcggtctcgtaataaagagaattcaaatgagaggtattgcactggatgtaaatatcgtagcccgttgcagtcctcgtgctcccatcgcgccagacggactccaccagggtggaaacctgttgcggtccatttgactggtagtagaagtaaggggaataggcggaggccagagtggaggaattggctccgtcgtaccaggtgaggccaacagtaagtgttctgcccggggtggaattgatcaagctatcccatgtggtcaacgcccgcatggcagcgtctatctggccttggtcccatgtatgggtgcttgatgaatcaaaaaatccctggtccccggaatccaggaaggtgcaggaaaaagtggagcctatactggctgtttgtacagcggatgaggaaggaatgtttcccaggcagcaggcagcgcagataattccaatccagaatgatcttttcatagatggcaaaataataaaaacttcctatagatagcagaaaaaatcctttccgtccatgggaaaacaaaatggttcagcctccttttcaagggaaggaatgcaatggaggtgggcggaggaagcacctgcgttcaatagccctttttttcgtcctggcagggggcaaaaaagaggaactgtagttattgcggaaacatcacgggagaaaatgttcaaaaaaatggcacgaagaagggggagtatgacaaaagcctaactattttataaattggaagttatgaatggacgtgataaaatgggtgaaagactctcacaaaaaacgactcgaaaaaaattgacaagggaggtgaaaatggtagacttctcggcacgccaacacggcgacgggatgaaaagcccggcggcaggagggactcgaaagagggcctgaatgaagccggggccggccacccggaagagcctcattaaaggggccgataagaagatttcaagggaatgactaccgaacccgccgagggttttcccgaatgcgtcgagagacgtgtgagggagaaaaaacccaaaggagcgacctagctccgagaggggcggattggtagaagcaaggggaaagaaaaaaggtcgtgacgcgcgccgtgcttggcagagcgaagaggacttcaagagacacaacttgagggaagagctgactgaagcatggcgcagatgaaatcgaaagattccatttggtccagcaatttcaaaaattatatttgatggagagtttgattctggctcagaacgaacgctggcggcgtggataagacatgcaagtcgaacgagagaattgctagcttgctaataattctctagtggcgcacgggtgagtaacacgtgagtaacctgcccccaagagtgggatagccccgggaaactgggattaataccgcataaaatcgcaagattaaagcagcaatgcgcttggggatgggctcgcgtcctattagttagttggtgaggtaacggctcaccaaggcgatgacgggtagccggtctgagaggatgtccggccacactggaactgagacacggtccagacacctacgggtggcagcagtcgagaatcattcacaatgggggaaaccctgatggtgcgacgccgcgtgggggaatgaaggtcttcggattgtaaacccctgtcatgtgggagcaaattaaaaagatagtaccacaagaggaagagacggctaactctgtgccagcagccgcggtaatacagaggtctcaagcgttgttcggaatcactgggcgtaaagcgtgcgtaggcggtttcgtaagtcgtgtgtgaaaggcgggggctcaacccccggactgcacatgatactgcgagactagagtaatggagggggaaccggaattctcggtgtagcagtgaaatgcgtagatatcgagaggaacactcgtggcgaaggcgggttcctggacattaactgacgctgaggcacgaaggccaggggagcgaaagggattagatacccctgtagtcctggcagtaaacggtgcacgcttggtgtgcggggaatcgaccccctgcgtgccggagctaacgcgttaagcgtgccgcctggggagtacggtcgcaagattaaaactcaaagaaattgacggggacccgcacaagcggtggagtatgtggcttaattcgatgcaacgcgaagaaccttacctgggcttgacatgtaatgaacaacatgtgaaagcatgcgactcttcggaggcgttacacaggtgctgcatggccgtcgtcagctcgtgtcgtgagatgtttggttaagtccagcaacgagcgcaacccctgttgccagttaccagcacgtaaaggtggggactctggcgagactgcccagatcaactgggaggaaggtggggacgacgtcaggtcagtatggcccttatgcccagggctgcacacgtactacaatgcccagtacagagggggccgaagccgcgaggcggaggaaatcctaaaaactgggcccagttcggactgtaggctgcaacccgcctacacgaagccggaatcgctagtaatggcgcatcagctacggcgccgtgaatacgttcccgggtcttgtacacaccgcccgtcacatcatggaagccggtcgcacccgaagtatctgaagccaaccgcaaggaggcagggtcctaaggtgagactggtaactgggatgaagtcgtaacaaggtagccgtaggggaacctgcggctggatcacctcctttctatggagaaagtgcatgaaaaatgcacaggtcggatctcttcccgagggaagagagagcggaacccgcgagggcccgcaacgaaccaaagatgtgtaaacagccagttcgcttggagcgaaactaggcacgacgtgcgtgacgaccttttttcaaaaagaaccgcaactgggggtatagctcagttggtagagcgccagctttgcaagctggatgtccggggttcgagtccccgtgcctccaccagtttcggtaagaaggcgggagccggaaaactttagtaactaaactttagtatttggtaactgtctctcagagacccaaagccgggcctgtagctcagttggttagagcacgcgcttgataagcgcggggtcacaggttcaagtcctgtcaggcccaccaaaaaaatcgattattgagggaaagcgaaaattgacatctgcgtggcaaagaaaacaattgctgagaagcaattgctttccaacaaagtgggtagttgaaaaacaactacaatacacaatttaaaacatgcataccaagaaataagacaatacagtaagtcacgaaagggctttgtggtattgtggaagtggtaaaaaacttttgcaatatgatgaagtaagtaagggcgtacggtgaatgccttggtgccaacaggcgaagaaggacgcggcaagctgcgaaaatcctcgggaagctgcaagcaagcgatgatccgggggtatccgaatggggtaacctgatcgaggcaatactcgatcgttcatacctgaatacatagggtatgaaacgcgaaacccgctgaagtgaaacatctcagtaagcggaggaaaagaaagagaaatcgattccgtaagtagtggcgagcgaaagcggatggagcccaaaccgaaggtactccttcggggttgtaggaccacgagatattcgaccatactggatagtagaacagcctggaaaggctggccgtagaaggtgaaagccctgtagacgaaatccagcgtgggaattagtggaatcctgagtaatacatcacacgtggaacgatgtatgaatcagcgcggaccaccgcgcaaggctaaatactagttggcgaccgatagtgaacaagtaccgcgagggaaaggtgaaaagaaccgctgtgagcggagtgaaatagaacctgaaaccgtatgtctacaaagtgtcagagcagagcaatctgcgatggcgtgccttttgtttaatgagtctgcgagtcagtgtttgtggcaagactaagggcttccggcccggagtcgcagcgaaagcaagtccgaatagggcgaattaagtcgcaggtactggacccgaagcggaggtgacctacccttggccaggttgaagcatgggtaaaaccatgtggaggaccgaacaggtgaacgttgaaaagttctctgatgagctgagggtaggagtgaaaggctaatcaaaccccgtgatagctggttctcttcgaaatgcatttaggtgcagcgtcacgtgctgatgcgcgggggtagagcactgacaaggctagggggcacacccgcttaccaaaccttatcaaactccgaataccgtgcaatggaacgtggcagtgagacagtgggggataagcttcattgtcgagagggaaacaacccagaccagcagctaaggtgcctaaataacgctcagtggaaaggatgtgggattacacagacagtgaggatgttggcttagaagcagccaccatttaaaaaatgcgtaatagcttactcatcgagtgatcctgcgccgaaaatgattggcgatcaagcgttataccgaagctctggactttaccttacggtagagtggtagaagagcgttgcatgcgcgttgaagggtgatggcgactgaccctggagcacatgcaagtgagtatgcagacatgagtaacgtaaagccgggtgaaatccccggccgccgtaaacccgaggtttccagggcaacgtgtttcgtccctgggttagccgggacctaagccgaggccgagaggcgtaggcgatggatatcaggttaataatcctgagctcgcgacccttaaactggggggacgcatgagaaaagatgactaggttattgaattccgagttgagtccacggactcagcgcatcattggatcgagtgccaagaaaagccccagcgtatgctaagcgacccgtaccgcaaaccgacacaggtgggtgggtagaatataccaaggcgtaagagtgaaacctggttaaggaactcggcaaattagccccgtaacttcggaagaaggggtgcctgcagcgatgcaggccgcagagaaatggcccaaccgactgtttatcaaaaacacagcactctgcaaagacgcaagtcgaagtatagggtgtgacacgtgaccaatgccgaaagattaaggcaaggggttagccgcaaggcgaagctctgaacccaagtcccggtgaatgtcggccgtaactataacggtcctaaggtagcgaaattccttgtcgggtaagttccgacctgcacgaatcgtgaaacgagttgggcactgtctcaaccaggcgctcagtgaaattgtagtggcggtgaagatgccgcctacccgcagaaggacggaaagaccctatagaccttaactgtaagctgtcattgtttcttcggttttaatgctcagagtaagtgggagacgctgaagacgccctttagggggcgtcggagtcatcaatgagacaccaccctttgaaactggaggatctaaccctgagccgtgaatccggccagaggaccgtgtcagccggtcagttttactggggcggtatcctcccaaagagtaacggaggagcgcgaaggtgggctcagcccggttggcaaccgggtgtcgagtgcatgggcataagcccgcctaactgtgagaccaacaagtcgagcagatgcgaaagcaggcccaagtgatccggcggtagaaagtggaattgccgtcgctcaacggataaaaggtaccttagggataacaggctgatcacgcccaagagttcatatcgacggcgtggtttggcacctcgatgtcggctcgtcgcatcctggggctggagaaggtcccaagggtccggctgttcgccggttaaagcggcacgcgagctgggttcagaacgtcgcgagacagttcggtcctctatcctctgtgggcgttggaaaattgaggggttcagaccttagtacgagaggaccgggtctgacgcaccactggtgcatcggttgtactgtcaagtgcatggccgagtagctaagtgcggacgggataagcgctgaaagcatctaagcgccaagcccatcccaagatgagttttccctataggttcgtggaagaccaccacgttgataggtcgcaggtgtaagtgcagcaatgtattgagccaagcgatactaatcaccaatagacttcatcatattacatcactcccgttcgtgaataacaacttgctgttgtcttgttcattggatgtatgtttaaaagtaacaccaccagccacgcagatgtcagtttacgctgattccttcccctcgtaacgagaggaaatcttcttagccacacacacaacaacccttaaaaaatccccctcaaagccccccaagggctcccgggcaggcaggatgaagaaaatgaaaaactcttccccctgaagcccggtggccagagcgcagtggtcccacccggtcccgttccgaacccggaagtgaaacgctgccgcgccaatggtagtcggacgataggtcccgcaagagtaggtcgccgccgggattttttttcatcaggccccgccagttcctcaactggcggggcttgttcgttttcttgatggcgcgatcttgaatctccttctcttcctatactttgctaaaaggaatatttggtacatgccgcctgtccgagccgtcgcgcctttgcttcctccaagctcttcggtaaaaaatcaataaagcggctatgctgtccatcgggagcatagaagaagaactggtcttttccttttcctcctccttccggctcccatatccggcagttgacgattgaaaaggaaaattccggcagttatagttgtgttcctgcaattgtaactcaaatgacctatctgctgtccttcctgttcctgtgccttgtttcggtatgctccgcaaaagaattgaagatttttttgctgacgggccaatccaattccctgggagccgtgaagggcagtcccgcttctccggagttgttgaagaagtatgagccgaagaatacgctctactggcatgagaacttcggccagagggaaggggtgtttcccggggcctccacgtcctgggagcaggtacggcccgccatgccgcggtataacggcagtttgtgcatggggccggagtacgggtttgcctttgcgctggagaagaacggatggttcagggatgcggacgtggcggtcgtgaaggcttccagggacggcggcgacaattcccactggcaaaagaacggccaggcttacaaggcgctggtgcaggccgtcaaaaacgcctgtgccgcggtagacaagtccaagcactccaaagtggagtttgccgggctgctgtatttgcagggggaaagcaatatcggcgcttccgtgccggagagcgcttcccgttttctggagcttctgggcaatctggcggcggacttgaaaccgtacggggatacgtccgccctggccgcacagagagccgtcattggcgagaatgccaactgggccggaaagaatgaaagcgatccggagacgggcaatgttaccggcggcctggaagggcgcgataccgaagttcagggaaaaacgacccaccaggtgatgaaggagctggccgcctcccgtccgtccctgggctatgcccctaccagggaccttcccaagctgactgccggcgaccagatgggggtgcattacaacggccagtcccagatcagcatcggcgcgcgctttgcctatgaagccgcccgtctggccgggaaggatgccggctccgtccgcagcggccgttatgaggctcctctcggttctccggatgcctggatgaatcggaaaatgccggggaaaaacgtaggcgtgtggaacttggcttcttccgtaaaacccagcattgtatcgggcgtggtgaagctgttcggcatccgtgtggaggaccccgccgttaataccgtgattattcagagcaaaggagggggctccggcgaccgtttggcgcttgggccgggaggcatccgtctggcggaggggaaaaatttgcagttggagacaaatgtacagcttgcgggtcgtcaggcctggaatattccgggaggctccaccgtggaactcaagccctcgccggtccaggacaaagcccaccccgtccgcttgtccggacaggcggaagtgcaggtggttcgtgcggaaggcggagggggagcggagggaatggcccgcgtcgtgttggaacgggtgctgcccgcttccttgaaatgttcctggatcttgtccggaaaggtggaaatgtccctggaaggaatggaggggcaggccctgaatctgggcagagtcctcgtcaaagacggcgctgtgttgaatctgaatggcgctaggctggctgcgggcagtatcgtcaatcaaggcggaacggtgaacccgtaacggacggccatgaacgaccctggcgcggaccggaatccgttcagggcttttccagtttttattccggtgggaggagagcataaaaaatgtgtcttcacacccggagtacatggaagcctgcctgcctcttattcacaattccggcatttccgtcaacccgtgcggaaacgcggacgggagtatttttgtccccggcttattcacaggaagtcttggttgggagatgctggccattaaggcctctgtactatatttggcgtactttttcctttatggatgcgttatgtagtagtatggtcgtgccatgagatgcgttcagtgcggtcatttggaggataaggtcattgactcccgtatgtccaaggacgggacgaccatccgccgccgccgcgtgtgcctgaggtgcgattaccgttacacgacctatgagcagattgaacgtacggagctgcgcgttgtaaaaagagacaacctgcgggaggccctgaaccgcgagaagattttgcgcggcttggtgaaggcctgtgaaaagaggcccgtgagcatggaccgcttggaccgcgccgtggaagaaattatttccgaattgcaccgcgaccatttgcgcgaagttccctccagcgagatcggcaagaaagtgattgaaaaactttacgccatcgatcccgtcgcctacatccgctacgtgtccgtgtaccgccagttttccaatgtggaggagttcatccaggagatcacgcagatgcgccaccagacgctgattgatcctctccagcgcaagcttcccatcctttaaattttccccttttccctgttccatgatcggcttccgaaacaacagaccgctgctcaagcttggtgattgcctgatcaccgagtacggggaacagtggctggcggatgccctggaacatgccgcccggcgcgccggaaccaccctgccgttcaaggatgacctgctggcctctgtgcgctattatctggagcatgagtgcgacctgtccgtcatgcaggtgtccgagctgtatgaacgcctgcgccgcatgcttacggaggtaggcctggcgcacctggcaagggagctgaaggaggaaacgccccccatgacggtcagcgtggcggagattgcccgcagcgtgccgttctggctgttttttgcctgtgagctgaaaaagcaggtggaagaattgcaggtgcacggcattaccaaatactgttttaccgggagaaaggaatgcgtgatggcgctccagggcaggaagcggtgggaccgttcctgccagaccctgctggaagacctggatttcctcctttcccgctatgaggagcaggaagcggaccgttgacggggaagcttaccggaacctgattttacggcgcttccgttccggcatgcgtttgagctgtacggtgggcgtccccagcacaagggcctgatggaccgcgtggcctttcggcaaatccagggcgcggagaagcggcttgtacttgaaaaccctgcatcccaggaccaggccgcccatgtagcagctccccagccccagcgcggtcagggccatcatgatattatgggagaggaccgtagcgtcttcccgcgcggtttgtgacgccgggccggtcagcaggagcagggccggggcgccgtacagtacggggtcttccccccgttcctccgcctgcctgcgcaggggttgcgtagcggtttcagagatgacggcgtggtaatcctgcggggagagggctagccgggcggccaggcgggtgacggggaaggcggccagcctttccagcttgtcgtacatgcggagcagggcctttctgatgccggagagggtatccgggtcttccaccgccgtcaggcggatgctctgggcgttcaggccggactgggagtattccgccgcgcggcgcaggacgttccacgtttcccggctgacggggtccggtttgaagtgccgcacgctcctggttttcatcagcaggttcagcacttccgcttcgcccggaacggggcctatgggttccgtgctttttactccggagtgggtaatggcctgccgcgggcagacggctacgcaatggccgcagccgatgcagtattgttccgcagctccttccagggaatcgaagccgcagaagcgggtcaggaagcaggctttttcacataaatggcagtggatgcacttgtcttggtcgatggtcagtttcatggctgtgtggattggaattcccgccagcatagggagacagggagtttttgacaagtaggcactattttgtaatatagtgtcaaaaaagatactgtaacgatgaaaaagccttcatcctcctaccgttgcccctgcggcgtcacgctttccctgatcggcgggaagtacaagattgtcatcctctggcatctttaccagaaggctcccgtgaggtttaacgagctgcaccgcctgatcccggaggccaccaccaagatgttcacccagcagctccgggaactggaggcggacggattagtggaacgcaaggcgtaccccgtcattccgcccagggtggagtattccctgacggccttcggcaggagcgtgctgcccgtactggaagccatgaatgaatggggcgcggcctacctggccgcacggggggagtagccgccgttacaggtgttttggcgcgggaccgttgatgatcttgcgggcgcggttcagggcggcgtcaatattctcgcagatgttgtagcgtttcagctcccggtaaaagggcgcgtggcggatgacgtccagaggttgcggctgcacgccgcagaccagcagggtggagccgtgctcccggcactgatggcagaagtcggaaagaacattcagtccggtggcgtccagcgcgggaaccaggcgcatgcgcagaatgactaccttggtatcgtgctccagcgtttccagcacctggtccttgaactgttccacggcgccgaaaaagaaggggcccttcacgtcaaaaacttccacgccttccggaatgctgagtttggccgtagaacggtcttcgtcgtcttcctcgtcgttgtccagcagctcgtttttaatggcggaaacgtcgctgatctgggccatgcggcccatgaagagcagggcggcgagcaccacacccacctccacggccacgaccaggtccacaaagacggtcagcaggaaggtgattaccagcaccgccgcatcctgccgcggccctttcagcaggcggctgaacgtgtgcatttcgctcatgttgtagcacaccaccgtcaggatgcccgccagcacggccaggggaatctgctgcgcgtactgggcaaaggccatcaggatggcaagaagggtcaccgcgtgaatcatgccggaaaccgggcttttggcccccgccttgatgttggtagcggtgcgggcgatggccccggtggccggaatgccgccgaacagggcggacccgatgttgccgattccctgggcaatgagttccatattgggtttgtggcgtcctcccgtcatgccgtccgccacggaggcgctcagcagggattcaatcgccgccagcagggcgatggtgaaggccggagccgtcagcgctcccaggttgtgccattcaatgtggggcagtgaagggaggggaagcgtgttcggaaggctgccgaaggcctgcccgatggtggttacgggcagggagaaggctacggaaacggcggtcatgcccagcatgcccaccagcatggccggcaccctgggccagaagcggcggctcagcagggtgatggcgacggtgccgacggccagcgccagcgccgcccagttgatggtgtggaagtagttgaagtagcacgcccatttttcaatgaagtcgccggggattttttccgtgatggtgaggccgaagatgtccttgatctgcgtggagaaaatcaccacggcaatgccggaggtaaatcccgtggtgacggggaatggaatgaagcggataagcgcccccatgcggcagaagcccaggataatgagaaagaggcccgccatcagcgtgcagaccagcagtccggacgcgtggtactgttccagcacgcccatgatgatgatgacgaaggcgccggtggggccgcctatctggtacttgcttccgctgaacagggaaatgaggaagccggccacgatggcggtgatgaggccctgggtgggagagagcccgcatgcaatcgcaaaggccatcgccagcggaatggccactacgccgacggtgagccccgcgaagaggtccgccagaaaggtttgcttggtataggtcttgagagaggaaaggagagcaggtctgaacatggctgccgggatgttggccggctgcggtggaatgccgccgccggaggggtgtaaaacgtccccttcctgcacccggaggcgcgccgcggagacggacggcaggttccccgttccgtccgctccccgcaggcagtgttatttggaaagaatgtcttcccagtaggcgatgcggcggcgggtgttcccggaattgggagcccccgggttggtacgctgggcgaaggcttttgtcaattcaaatacgtcgcgcgcgtccgttccgtacgcgtctgaaatggaggcgaactgttcgtcgctcaactggttgaggggcgtacccgtggaaatgctcatggcgacggcttttccaaccagttcgtgagccttccggaagggaacgccgcggcgaaccaggtagtccgccaggtccgtagccagcagcatgggatcggaagccgcttccagggctcgggccgtgttgaccgtcatggcggccatcatctccgcgttgacgtccagggccagcttgatcgtgtcaatggaatcgaagaggggttccttgtcttcctggagatcgcggttgtaggtcaggggcagccccttgacggccaccatcacggcggtaaggttgccgtacaggcgtcccgtcttgccgcgggtcagttccgccacgtccggattctttttctggggcatcagggaggagcccgtcgtatgggcgtcagaaagggtggcaaagccgaattccgccgtgcaccacaggatgacgtcctcgctcatgcgggaaaggtgcgcgccgatcacggccaggtcaaagagggtttccatgatgtaatcccggtccgcaatcgcatccatggaattctccgttacggcgtcaaagcccagttccgcggcaattccgtggcggtccaggcagatggtggaaccggcgatggctccggaacccagcggggaaacgttcaggcgcctgcggcagtccgtgaggcggtctgcgtcccggttcagcatttccacgtaagccagcaaatggtggcccatcgtgacgggctgggcgcgctgcaggtgggtgtaccccggcatcatggcgtccgcgtattccttcgccttcataaccagggcccgttggaggtggcgcactttttccaggatttcatcaatctccgcgcggcagtaaagccgcgtatccgtggccacctggtcgttgcgggagcgtgccgtatgcagcttggctcccggcgcgccgatgcggcgggtcagctcgctttcaatgttcatgtgcacgtcttccagctcacggctccaggtgaagctgcctgcctctatgtccttcaggatatccttcaggccggattcaatggcgctgaattcctcctgcgaaagcagccctgccttgagctgtgcccgcgcatgggcgatggatccggcaatgtcctggcggaagagcctccagtcataggagacggattcgccgtagcgttgtaccagatcagcggtgggtttagaaaatctgcctttccacatgacccacatgttgtgccccaggagcttccgttttaaaagcctgaaatgggtaatggaggcagattccgcggaacgggagaaaatccgtgtgcctggaaaaccggaatgaggccggaagaaaaagggaaacggcgcatggctgccttttgcctgtggcaagagggccgcatatgttactatggctccgtgtgcatggatgatgaaaagcccctgaaacgggcggatttgcggaaacgcgcggaggagaaggcggcggaactggccgcggaggggatggagctgcatcccgtgacggcttccgggcgaaatctggcgaaaaagttctggggaaaggaatggatgaagagcctggccgcgtgcgaggtgtacggcatgcggctggcccccgggcgtacttatttgcgctatggctgcgttctggacgtgaaagcggctcccggccgcattgacgcgctggtgatgggggagcatttgtatgaggtccgcgtgcatgccgcccctccggatgaagaggcgcttgcccggttgcgtgcgcggtgcgccgggcatatcggttcctggattgacttgctgaaggggaacctttccccggagctgctggaaatcctgtgcgatccggagggcggcctgttccctgcgccggaagagtggcgtttttcctgttcctgcccggactgggcggatttgtgcaagcatgcgtccgcggtcctgtacgccttcggcgtgatgctggacgaacagccggaactgctgttcaccctgcgcggaatggacgcctccgtcctgattccgaaggctccggaagccgttcccggaggagaagacgcgctggacaaggatgccgggtccctgtcggacatgttcggcatcaggctggattgattcccgccgccgtgacgttatggccttgttccggtcttgaacagccaggcggggaggggatggtcgtcctttttgacgaattggcggcagacggggtctttccggcggtcaagcatgccgccgtgcgccgtcagctgatgctcctgcatagtgctcgcccgggtggagaacgtacccgctttttccatcatgcattgcagggacggaagggccgtgcaggccaggtaaagaatcaggagtgtccggtatttcgtgcccccctggcggaaggcatggagaaagagcagggagaggaagggatagaggaccgccggggctttaaagagaagttcattattcatgatgcccgtgcggaaaaagaggctgcctgccattatccccagcgtgatgtagtacagcggattcctccggcatgcttggaagagcagcgcacccggcagcagaacgcccagggccagagccagcaggaaactggcgtatttgacggagccgggatagagcagcagccgctgctggccgtagtggtagatttccgcatacttcccggcaaaaaggcaggaaaattgccccccaccgtccagatgggcataaaagacggccatgaccgccgcgcacagggcggcaacccagaaagccggctggagcaggagggaccggagccgggaaggaggagcctgctccgttgggcggcagaacagggtttcatacactatgtacggaaggagcagaagagcgcccagcggggaggacggcagcagcaatgcccccatgaaataatatcccgcggcaggcagggagcgggtcagaataagcacggcgcacaacagcgccggaacggcatggttgaacgtgttgaagagttgggcgggcatgccgatgaacagcaccatctgggcattgtattccgcgaacagggaggggaggggcattcccaggcagtccagcgccgctgccggagatcccaggcagaagagaaccagcgcccaccaggccgtttgccggacgccccagcgggaggcagccgccagcagcgccagttccagccccaggaaggtccacagggccagcagccagggagcccatgcatccggacagcaggaggcggccagcgcaggaggcagccaatggcccagatagtagatgaagtggcgcccgtccgacatgacgaggggccaggagcctgccgcaagctgttcgtaaacggcgttgcggactgcaaagtccgcgtgctgctggcagtggcccgtgaagccgcacagcagcaccagcagcaggcagaaggcggacagaaagcccagcacggccagtccgcgggctttcagaggaagccgttgttccggaagattccgggtgcaggcgtacaatccatacgccagtgcggcgcaaagcggaacggagaaggcgggatgcagccatccccacaggaagaggcccagaggaagcgccaggtacgccagtgccgcgcacagcagggggcgtgtgggcagggaaaggctgggagacatggcgcggaacggagatggggctttttggcaatgcggaatccgaaagcccagcattgcatattttgtcccaaagaaaaggatgcaattaccccggagaatgaaaaatccccgcgccgcctcacgacgaccggggatttgggttgctttataccagttccggcaaaagaggtcagaacaggccgaatccgttgccgtagcgggcggattcccccagttcctcctcaatccggagaaggcggttgtatttggccatgcggtcggaacggctcagggagccggtcttgatctggccggcgttggtccccacggcgatgtccgcgatggtggcgtcttccgtttccccggagcggtgggaaataacggcggtgtagcggttgcccatggccagctccacggcatccagcgtctccgtcagggagccgatctggtttaccttcaccagaatggagttgcccacgcccagatgaatgccttttctgaggaattcaacgttggtgacgaagaggtcgtccccgacgagctgggtgcttttgcccagtttttccgtcaggattttccagccgtcccagtcgttttccgcacagccgtcctcaatggagacgatggggtatttcttcttcagttccacgtagtaatccgtcagttccgcggcggttctgcggctgccgtcggacttcttgaaaacgtacagtccggattccggatcgtagaatctggaggaagccacgtccagggcaatggaaatatcctccccgaaccggtagccggccttgtccacggcctgggcgatgcagtccagcgcgtcttccgcggagttcagcctgggggcgaagccgccttcatcacccacggcggtggaaaggccgcggctgtgcaggacggatttcagggcatggaagacttccgcgccatagcgcagggcttcccggaaagtaggcgcgccggacggaacgatcatgaattcctggaagtcgatgggcgcgtcggagtgggcgcccccattgatgatgttcatcatggggacgggcagaaccttggcgttcggaccgcccaggtagcggtacaggggctgttgcagctgggccgccgccgccttggcaagcgccagggaaacgcccagaatggcgttggctcccagtttggccttgttgaaggtgccgtccagggagctcatgagggcgtccgccgtggtttgttccgtcgcttccaggccgatcagggccggggcgatgacgttgcggatattgtccacagctttggtgacgcctttgccctggtagcgggccgtgtcgccgtccctgagttcccaggcttcatgttccccggtggaagctccgctggggacgcccgccgtgcctgtggctccgccttccagataaacgtccgcctcaatggtggggttgccgcgtgaatccagaatttcacgccctgttatttttgcgatgcgcatttctttcataaaagccggatgggttctgccttgaaaagcagatattggaattagtttaaactaatttacaggccttatgtatcccgtatccggcgcgcatgcaagctttttctccatcacaggcaacccggttgatccgggaatcacgctcagccgcggtaatgttctttcagccaggctatttcctcgccgtgcccggcgtcgtcccggggcgtttccaggaaaaagggcacttcccggagggaaggatggttgatgatgttgatgaaggcctgttctcccaggctccccttgccgatggtttcatggtggtccttgaaggaggagaaaggcgtcatgctgtcgttcaggtggatggcgtgcaggcgttccaggcccagcacggagtcgaactgttccagcacggcgtccaggctgttgacaatgtcgtacccggcggaataaacgtggcaggtgtccaggcagacgcccagcttttctttcaggtccacgcgctcaatgatggcggccagttcttcaaaggtcttgccgagctcgcttcccttgccggacatggtttccagcagaacggtggttttttggtccggagcaagcacgccgttcagttggtccgccaccagttcaatgcctttttccactccctgtcccacgtggctgccgggatggaagttgtaaaggttgcccggcagatgctccatgagctccaggtcttccctcagcacctgggccgcaaagcgggtgactttggggtcagcggagcaggggttcagcgtataaggggcgtgcgccagcagcgtgctgaagccgttgtcttccgccagcttcagaaaacgggcaatgtccggttcgtcaatggccttggccttgcttccgcgcgggttgcgggaaaagaactggaaggtgttggcgccgatggaaagggcaaccctgcccatggcttcgtaaccttttgcggaggagaggtggcatccgatgtacagcatggcggtaaaggtgtgtaaacgagcatatcggaagggaattgccgtgtccagcatggggggtggtttcaagcggctgccgcatggctccgtgcctgcgcggtgtgccatggccgtggcgggaaaacagattgacatttttacgattttaaaaataataaatccattgcttatgtccgattgctcctgcacctcttcatcccgtccggttcactccgtcaaggagctggaacctcttgccggtgttttcaaggcgctggggcatcccgtgcgcctcatgattgtggagatgcttctggatggagaacgctgcgtctgcgaactgcagaaggattccggacgtgacatgtctaccgtttccagccatttgaacgtgttgaagaacagccggatagtgtcctgtgagcagcgggggaaaaatgtgtattattccctgtgctgcccctgcctcagcagcgtgctgtcgtgtttgcaggaaagcccggcgttaaaggggtaacggtattggtattcagtttgttcagtattttttattcatacattttgatattcttaaaaatataaatcaataattacatgaagaggatagtaatttacggaccggggtgcgccaaatgtacggcattggcgcaggtgacggagcaggtcatgcgggaactctgtctggaaccgcttccggaaaaggtgacggatgccgcgcaacttgccgccgccggagtgctggaaaccccggctcttgaggtggacggcaggattcttgtttccggcacggtaccctcccgggatgaaatcaggaggatgctccaaaaagcgcttcaagcggattctccggagaagggttgctgtagcggaaggccggaggattcaagggcagtaaaggggaatcttccccatccggaggcaggttcctgcgggtgcggaggagggggctgctgcggcagcgcttccttcaagcgaaagggcggatggaaaagggctgccgtctgggctgcggcgctgctcattctgctggcggtggttaagatgatgaatcaccgggaacgttccgggggcggggaacctccccgcccgtctgtttccgcagagcggtaggagaattcttcccggttatgattcaggattttgctgactggctggtttacggggtgttggagttcacaccccatacccgtctgggggaggcggtcaacttcttcgtgtacgacacggtgaagatcctcttcctgctgtacgcgatcagtcttttcatgggcgtggtgaacgcctatttcccggtggaacgcatccgcgtgtttttgacgacaaagaagctctacgggtttcagtattttttcgccgccctgttcggggcggtcacgccgttctgttcatgttcctccattcccctgtttatcggctttgtgaaaggagggattccgctgggcgtgacgtttgccttcctgatcacatcgcctctggtgaatgaggttgccatcgccctgttcctgggggcgttcggggtcaagatcacggtgatttatgcggtctccggcattttgctggggatgatgggaggggctgtgctggagaggttcaggctggaacgctatctgtccccctggatacgggggctgcttgtccagtccggggaggaaagcggcgcgtgggagcggaaggggacgccgttccggaagagatgggccgtcatcatgcatgatgcgtgggaaatcgtaaagggagtggcgctgtatgtggtgatcggcatcgctatgggagcggcggtgcacggctatgtgccggagggattttttgaagcgtccatgagccgggagcattggtgggcggtgccggttgcggtaatttgcgcggttccgatgtatgcgaatgcggcggcgatagttccggtgatccaggtgtttgtggcgaaaggcgttccgatcggcacggcgatagcgttcatgatggcgacggtagggctttccgtgccggaggcggcccttctgaagaaggtgatgacctggaagctgatctggattttcttcggaacagtgacggcgtttatcattctgtccggatacgtgttcaatatattgattgctccataatccctgatgggcggaaaaggaaaaaagcgcaggcgccccgtttctcccgcgattgcgggaaacaggccatcttcagcgggcggtacggctttaactcgtagagttgtctgaaagaacgggatgcccggagcgtacatagttccgaacgttagttatgcatttgatgagaagattgaatcaattggccccggcccttctgggaacctgcatgctggccgccgggttggcggaagcggaagtgaagaatggggttcccccgttgaagcctgttccttctccggctcaactggcatggcacgatatggagatgtatgccttcatccatttcaccatcaatacctttaccgggaaggaatggggttatggcgacgagaagccggagctgttcaacccttccgattttgatgcggacgacctcgtcaaaacgctggcggatgccgggttcaagggagtggtgctgacctgcaagcaccatgacggtttctgcctgtggcccacgaagactacccagcacagcgtggcggcctccccgtggaagcaggggaagggcgatgtggtgaaggagatttcccgcgcgtgcaaaaaatacggcgtcaggttcggcatttacctgtcgccctgggaccgcaacgcttcctcctacggcaccccggaatatatcaaaatgtaccgccagcagttgaaggagctggcgacgggatacggtcccgttttcctggcgtggtttgacggagcgaacggaggggacggctattacggtggaacgcgggagaagcgctccattgaccggagcacgtattacgactggaagacgacgtggggggaactgaagaaacggcagcccggagcggtgattttttccgacgtggggccgggcgcccgctgggtggggaacgaaagcggttatgcgggctatccctgctgggccacgtacacccccgttccgctgcaagccgggacggaacccgcgcccggcaccgtgcgctaccagttgggcacggaaggcaccgtggacggcaagtactggattcccgcggaagtggatgtttccatccgtcccggctggttctggcatgagcatgagaattcccgcgtccggacgccggagaatctgctgaaactgtactttgacagcgtaggcagaggggccaacctgaatctgaacgtgccgccggaccgccgcggccgcattcatgaagaggataaaaagtccctggcgggcttccgtgcgctgctggatgaactgtattcccgcaacttcgcttccggagcgcgcgcggagtcttcctcctcatggaaggggcacggtccggaacaggttctggaccggaagcgggcgacgtactgggcggccgctccggaagataaagatccctccctggtgttgaagttgccggaacctgcggcgtttgacgtcatccggctggcggaacccgtccagctggggcagagggtgcgcaagttccgcgtggaggtgcgtgaaaacggccgatggagcaaatggacagaaggttccagcataggagccagggttcttttgaagggcaggcccgtgacggcggatggagtgcgcgtggtgctggaagagtcccgggccgttccggccttgtgcgaggtttccctgtggaagcaccctgtcatcttgaatgcgccggcggtgaattacgaccgcgacggccgggtgaccctggcatccgcagagggcgtggtgaccaggtacaccacggacggaacggatcccggcccgcagtccgccgtgtacagggagcctttccttctccctgccggggggacggtgaaggcggtgggcgaataccgcggcagaaggtcttccgtaaccgcgcagatcatccccgtccccacgagggactggaaggtggcggccggggaaagaagcgccgccgccccggagctggccattgacggcaacccctccaccctctggcatacgcatgccgcccagggggaaatagctcctccgcaggcgctggaaatcgacatggggcgtccggtcaacgttgccgccgtcatctacacgccccgcaaggattccgcaaaggggacggttgaccgctacgccgtctacctgagtgcggacggaaacgattggggagctcccgccgcggagggagagttttccaatatccgcgccaatcccgttccgcagcggattgacctggagacgcccgtgaaagcccgttacctgcgttttgtaggcaagcgggtagtggaaggcagccatgttgccgttgctgagttgggagtattggaaaaataagcggtttcctttttttatcatcgtagtcctccggcgttttcttgacggatggagggaagcggggcaagatggcccgcatggaacaagtcagtctcatggagttgggcaagctggccgcggagggccaggtggaagcggaagtttttgcccagatcgcccagtgcgcgcagaagatgaccaagagcaacaagccgtatctggacgtatcttttgccgatgcggaagggacgatgggactgaaggtgtgggaggacaagccctggttccgcacgctggcctccctgcctctccgcagtttcgtgagcctgcgcggccagtggaccaaggggggcttcggcatggaagcggccgatctggaagtgcgccccctggacgaacaggagaaggaaagcttcctggccgggtccggaaccttgaagaagaagcaggaagcggacctgaaggagatttgcgtgctcatcaagggcatgaatgatccgcgcattcgcgccctgtgcattgaattcatcgaacagttcggggaacgcctccagcgcgccgccgccgcccgcacttaccatcacgcccgccgcggcggactggtggagcatgtggcgggaatgatgcgcacggcctctgccgtctgccaggcgaatccggagctgaaccgcgacctcctgctggccggatgcctgtttcacgactgcgggaagctgtgggaaaactgctacccgaaggaggatttcacgatgccctattcggaagccggggaattgctgggccacattccgctgggcattgaactggtcaacaatctgtggaagcgcatcatggcccttccggaagcggaatcctggaagacgctggaccccgcctccccggacgtgcgcatgcacctgctgcacctgatcgcctcccaccacggggaactggccttcggctcccccgtgttccccaagaccccggaggcggtggccctgcattacattgacaatctggacgccaagctggagatgttccgcggcgcctatgagacgagcgaggcgctggctcccaaggtgctccagcgcaaggcccccctgcctgccaacgtcgttcttccgctaccttccgttcttcccctggaacgggacggcgcggacgccatgcagtaagtttttccccggatggaacaggagcgccacctgcggcggccgtggctggaacggaccatggccgcggctcccctgctggctcccgctctcgccatgctgtgcgcatgcgcggcggtggacgtttccccctggttctggggcctctgcctctgctgggcgctattgccctgcctgttccgggccccttccatgagcctgctggccattgccctggcggtgtgggcggccatgcatctgctggcgtatgaccgggaatacgggaatgttcccgtagaggcgggaaggactgtcgccatggagggttccgttaacgccgtttccggaaagtccgttctgttccgcccggatggctcccggtggctgtacgcagtttcctcccgtggcggggaatgccccctggcagtaggggaacggtaccggattgagggagagacatatccgctccaggccccgtgcggccccggcatctttgaccgggagcggtggggatacctgcacggcattattgccgggattcggctggatggcgcctgccgggtggggccgggcgactggcgcagccgcctccgggcgttttccctgcggctccgggagggggccgcaggcctgctgagggaaggcgcgccggcggatgacgaggcccggcaggtgatggtttccgccgtgctgggggacaagacggacgcgaggccggaaacgatggcgaagtttctggaaagcggctgcatgcacgtgttcgccgtcagcggcatgcatgtgggggtggcggccatgctggttctgggaatgctgaggctgttgtacgtgcgcccccgtgcggcgcggctggcctgcattccgttgctggcggtgtacgtgtttgtgaccgggatgtccgcctccgccctgcgggccttcatcatggcggcggtctggctgctggcgtccgtgctgcgccggaaggggcatccggccaatattctggcgctggctttcatcctcctttgcctgatggacccgctccaggttttccagccggggttccagctctccttctgcgtcttcgccgtgattgtctgcctggcaggatggagcagccgggaaaggcccctgtgggctccggacccgttcattccttcccggatttacaatgcgcgggaaaaaggcctggtgcgcctggaaaaagcgtgccgcggcgcgctgctcatctccgtgggggcgtggctgatgtccattcccctgacggcatggcacttcgacacctggaacctgtacgctcccctgaccaatttgtgcttgagcgtgctcgtttttccgctcatgggcgtctccctgttcgggctggtgttcgcatggtgcccgtggatgtcatgcgcttgcaatacggcggcttcctggctggcctccgccatgctggcggtggcggggggagtggcttccctgccgtgcagctatctttcttccgcgccgcctgccggggaaaatgaagccgtcctcgttccgttgcagaaggacgcctggtccgcggtcatctccaatcccgcgctggtcgtggccgcaggaacggaaaacgcggtccggtacaccctccttcccgtgttgaaggcgcgcagtatccggccttgcggcgtactggcttccggaaacggcagggcggagcgcgccggagtggaagcgctggcgaaggaatatcccggaatccggaactggggcgcagcggatgcggaatgtcccgttcggcaatggaggttccgccctggaaatgaacttgttttggaagattttcccgtaccgttgtccacgggaatccatcaggaccggaaccgggtgctggcgtggaaatgccgcgggcggttcgtcctgatgatagggaatgccgggttttcctccctggcgcgggcggcaatagcgccgcgggcggatgtgctggtcatcgggcaccatccgcgcgatccggtggacagcgccgaatggatcagggccacgggcgcccgcgcggtcattttcaccacggagcatgaatgccccgtgccggagggaacggccgtgtaccgtctcccggaaaccggagccatctatttgcgggtggaagaggaaggcgtgcaaatcatcccctggaagggcatgggacgccgtacagggtgaaccccgtgctttcctcaatgcggatgggcagaagctctcccgtcaggtcaggggcggcatccaccatcacgggcttgttctgggaggtgcgtccggagaggcgcgcttcatttgttttggacggtccttccagcaggacttcctgaacggtgccgaccagttcccggtttttccggatggcgatttcattgaccacggccagcaggtcctggttgcgcgcttccttcacttcctccggaatctgttcctccatggcggcggcgggcgtgccgcggcgcggggagtagcggaaaatgaaagcgttgtcaaactggacccgttccacggcctgccgggtcagcaggtagtcttcctccgtttctccggggaagcccacgatgatgtccgtagtgatggacaaatccgggcgcgcctgcttcatccgggcgcaaaggtccagataggtttcattcctgtacggcctgcgcatcattttcaggatgcggtcgctgccgctctgcatggggaaatggatgtggctgcacagcttgggcaggtaggtgaatgcctgcaccagatcctgccggaagccgatgggatggggggaaacgaagcggatgcgccggaggccttccacctcatgcacggcttccagcaattggacgaagccgcccttgccgtccgccgtttccatctgcctgccgtaccggttgacgatctggcccagcagggtgacttccttcacgccggcgtccaccagcatcttcacctcgtccaccacgtcccggacggggcggctgcgttccttgccgcgggtgtaggggacgatgcagtaggcgcacttcatttcacacccctgcatgatggagacatacgccgtggagcgcgcgccgggattcaggtggtcccggatgcggttctgggaatcctcctcatccgccacgtcgcacacgtgagtgcctgaaaaagcggtctgcaattcatccatgcggcgttcctggcgcgcgcgcagaatgccgtccacatgctcaaacacgcggtggtacttctgggtgcctatcaccaggtccaggcgcggcagttccttgaacaactcatccttcctgctctgggccatgcagcccatcatgccgtacaccacgtgcggccggtgccgctgctgcttggccagcaggcccatcttccccagcgccttctgttccgcctgctcccggatggaacaggaattgaacaggatgacgtccgcctcatcctcgcggtccgtcatggtatagcccttctgcacgaacatgcgggccacctgctcggagtcccgctcgttcatctggcagccgtaggttttgatgtaaagcttgggcatggggaaaatcagatgttctttttcagggtgaccacgcattccagatgtttggtctgggggaacaggtcaaagggctggacggcggtaacggcgtacccggccttgtcaaattccgccaggtcccgtatctgggtggcgggattgcaggaaacgtacaccacttttccggggccgaaggcgaataactgggtcaggaactccatgctgcatcccttgcggggcgggtcgatcaccacggcggttttttccgcggggaaatccacctgggcgaaaatggctccggcgtccgccgccaggaattccgcgtgtttaatcccgttgctccgggcattgctgcgcgcccagtccgcggaagtctcgctgacttccacgcccagcacttttttaaatttcttcgctaggctcagggcgaacaggccggaaccgcaataggcgtccaccaggaactcctccccgtccatgctcgcctgttgggccacgtagtccgtaaaaagcggaagaatgaaaggattgttctggaaaaaatctcccgccaaaaaatgaaattccagaccgcccacgcgctcgcaggccacggcgttgttattggtaatgacggtcccttccgaggcgcggagcagaatggtagctccccgcttgaaccgggccgcggcctggtaaacgctcttgcgggccagcggcagggcctcgttgatgcactccatggcaatcgggcattgcggcacatccaccacttcccttctggaacccgccttcaggaagccgatggccggccggctggcttccttgggcttgtcaaaatggggcgtaatcttggagcggtaatggtattggcggggggaggcaatggccggattgacgggcagttccagccctgcctgcaaccggagcaggtccgccacctgccgggttttccagagaagctggcggtcgtaggaaaaatgctggtactggcatccgccgcaggtgccgaacaggcggcagccgggctccacgcggtccgggctggggtgaagcacttccaccaggtccgcggaggaataattcttgtcgttgcgccagacgcgggccttcacgcggtctcccggcagggcgaaggggacgaaaaccacccagccgtccacacggccgatgccgtcgcccgcattggaaagggcgtcaatgtccagttcaagctcctgatggtaggaaaaaggttccgggtggaagcccttgggaatggtcgcagtcatggtgaaggaaaagaaaagggttacggggcggagggggtgatcagcttgccgtccagatcatacagcagggtttccggcagccggggggtgcgcagcccggggcggaagtcgccaggcaatacggctggtcccggcacggactctgcgttctcctcctccggaaaaatggccggtttcaccggggccggagcccagggggcggggcggtccgccgcggcggtttgttccggttgaacggctggggcgggagcgggttcctgaggcgccgtttccttgttggaggaacaggaagcggtccaggccagcccggcaatcagacaggagcggatcaggagctttttcatggcgcggattcttacagcttcatccgcgcttggcaatcgaatttccgctttattccccttcttcccgtgtacggggaacggaataagggaaaaaggcttccgtaccatgcggctcaaatgcgctcgctcgtttttgtccgcggatggcggaagtaggggatgcggtgcgcctgcctccgcttcctgcgcatgtggcggagcatgcggaagaagatgaaccctccggcggaaagaagcagcgtgacgctccaccagtcccagcccacaggagcgtccggcagccctatgcgcccgatcatcggaagtttaagggcggggcgcaacaggtcaaagcctgcgttcaggcccagcaggctgacttccgctccttccgccagccccaggctgaacccggcgagaccccataaattgatgcggatgcccgtgccgctttccgtccgtccggcaatgccgccgggcagataatccttccccaccgcatgaggcggaagctccaccgtcagatccggcacttccctcatcagcgcggcggtgaacgtgttgctgttggggccgggaatgatccagtaggtatcggcataggggtaatcctgcgccgtgcggctgatgacgggaatggccttttccgccgctgctccgcgcaattcctgaatcaattccggttccgcgccgaaccatttgcggtccggaatgtcccgcgcgatggaaacgctggttccccgggagggaagctggtagcccatgacctggtacacggtgtaaaagccggcattcttctccttcacggctatccaggtgtgcacggcgaaatacctgcgccagccgaaggcgcgtgccgaataaacctggacgacggcttccggttcttcagcgggtagaggggccaggctgctgctgctgcggtccgcagttttccagtcttccgcagggtggaaataaaccagggctgcgcccaggagcaggaacgccatgaacagccagaaaacaaagcgccatttattccgtgaggggtgcctgcggttataggggttggaatggcgcatggcgaatgtatataccttgaacggcaaatgatggcaatggcggaatcttgaagtttgacttctgcgcagggagacttatggttactgtaatatgatcaagtttgccgtttccgtgctttgcgccgccgccgtggcaggcatgctggctcccgcttccgccctggcgcagcaggctcccgttccagccgtgaatgaatcgggcagtcccgcctttgacaagctgcgcaatgaggccatcgccaagaaggttcccctggtcatctacctgacggggtcttcctggtgcgtgtattgcaatatttttacggacaagcatatcaaggagcggactttcaagagggcctccggcaaaaaattcatcttctggatggtggataccaggcaggccccgggaaggacaccgggttcctttaccttccagttcgttccggaggaagcgggcaaagtagtgggatgcataggctccaaggccccctatgtcgttttcgggcctcccgccgtcatcatcctggaccccgtttccggaaaaatgattaagaaaatggtaagccagggggatatggacaaggaaggcaagtccctgcccgcggttatcgaggaatgctggaaaaacttccagaaggaaggtcaaaagaccgcctgagcattcggacccctcccatgaagaaaggagtgaatccggaatgttcatttcccgggcgtttttcccgcaactgttttctttacgtcaaaaacggtaaatgaagcgcaaccatgggcgcggcgtgccggaataatagggatgccaccggtgtccggggtggtgcatggtgcggccccattcatcctggtggcgtgcctgcggcgcataggtgagctgccgccattcccggcagggaaaggaggaaggctccgtgcatgaggcgcaaggcgtcagaaatgcctggagggcgctggaagaacagcagtaatagggaacattgaaccggggcgccaatccgagcgccagcagaagccatatccatatccggagacggggatgccgcgcccaggtgaaggccagaaaggcgagcaggcaggccatcgccggaacgctccccttgcagagcaggtcgttgacgtctccgttgacgtaaaagaagggcagcagcagtccggttgccagcgtacagataaagagggaattccgccggaaatcccgccagcagaacagggcgtacagcaggaaggaggtccctgccagcagaaaatcccccggccgcgtataaaaaggccgccagcccatatgggaggacggcgcgtttaccgccgcataataaagaaggaagcacgcccccagcatgacggctgccggaaaggagggatgaagcaggctgcgccggggggagcggctgcctttccattgccggagccactggcagaccgccaggggcagcccccctagagccgcgaggggagaataaaaggccgtggccgcgaacaaaaggggcatccagtgcgggggcatgcgtcccgaagccaggaagatgaaaaaaagcatgacagggatggaggcgtttgcgctgcacatgacctgttccgccgtgccgaagtaatgcaggcggaacagatccagccccagccagcattggaaattcagaagggagccgaacattaccatcagcagggcgagcagcagggaacggcggccggagaaaacgcagagccacagccaggcaagaaacaggccccatgcaccccacagcacgacaaatgcccgggcaacttccagcccagccactttgcctgccagggccggaaccagccagaaccctgtgttgtagatcaagacgtctccgtccggaaaaacgacgggccacgggctggcgaccaattcacgaaggcaggcgttcctgacgatgtggtccgggtgctgattgacccattccccccatccggacaggaccatcagggcgatgaatgcgcccaggacaagaaacgaggatcggttgaacaggggaaaagaggggagggattccctttccggtagttccttgcgccttccgggagccagtcccgcggccatcagggccgcgagggggatagagacataccagtgcatccaccaggccatgaacaccaggacgggcagcagaagccaggcgcaggtattccatttcaacgcggtcacgttgaaagctcgttccgggaatggagcatcggcggcgggggaaggcatcttccctgaaccttaatgggtccgccggaggggggcaaggatgaaacttgcagcccggaacggaagggcatccccgtatggggctggtggcaggaatgcctgcgccccttctccgctttaccgggagaacggggcatatcatgctgggcggcctatgaataaaacacaattcgtcagggaacttcagcgggagctgggggacggcgttacccccaggcaggcggaacgtgcgctggacgcggtgctggacacgattgcccggtcggtcctgaggcgctcactggtcaaattccgcggctttggttcgttcagcatcaagcggcggcgtgcccgcgtggtacgccatccggaaaacggcagcaaactgtttgtgcatgaatcaagcaccatgaaattccggccttcctcccgtttgtggaaaaagtaggagaaacgcccgggctctcctgccattttgccattgacttccctgtccggggcagggattaatggacaaggcaggggcggccgtgcgcctgcccggaaaaaatgacctaccctttccccatttgccgaccatgactccggattccgttcatttgctgacccgttcctcccagatgatcctgttcagggatgaacagggccgcgtgcgccgcgcctattacggaccgcggctgcgtgaaccggaggatgccctggaaagcgccgcggatgcgcctcttctgtattccgccctggcggactccgtgacggggcttcccaatgcgtcggatgaatactgcatttgcgcgacccaggcggacggaactctttctctgcgcctggaatgccagggatgggaagtgctggaactggatgacgaccgggaagaagccgtcttctatgggaaagacccttcctaccccgtgcgggtggaaattcatgttcgctcccaccgggaatcggacgccttccttcaatgggcggtgatacggaacgaggggagggaaggcatccgcctgcaccgcgcggcgtccgcgcaactgaatttgcgagcggaacgttactttgtcaccagcttccgcggcacatggggcggggaatccctgatgagcgaggaggaagtggcgcgggggcatgaacttgccctggtttccggcaccggaacccgcgccgcccaggagggaagccccggcttcgtcatctccctggatggtccggcgcgggaggactccggggaagtggtgctgggagcgctggcgtggcccggcaactaccggatatggttccgccacagcccgtatcactacctctttgcgggagcggggctggacgtggcccccgctccctatctgctggacggcggcggagtgtttgaaacgcctcccctcattctggcgcacagtggaaacggcaagggggaagcctcccggcgcatccaccgctgggcgcgacgctacggcctgcgcagcggcggcacggagcggctgaccttgctgaactcatgggagggagtgtactttaccttcacggaaaaagtgctgcacggcatgatgaaacgtgcggcggacttgggaatagagcttttcgtgctggatgacggctggtttggcggacaattcccgcgcaatgacgcccgggccggtctgggggactggcaggtaaaccgtgctaaactgccccatgggctggaaggcctgatccgccaggcggaaaagctggggatacgcttcggcatctgggtggagccggaaatggtgaacccctgctcggaactttatcagaagcatccggaatgggtcatcggccttccgcaccgggaaaacaggctggaacgcagccagtacctgctggatttgagcaatccggacgtgcgcgcatacattcttgaagccatgcggaaactgttgggaggacatccgggcatttcctacgtgaaatgggactgcaaccgcaagatttccgatcccggctccccctggctggacgccagccatcaggggaacctgtccattgactacgtgcgcggctatgaagccattcttgatgcgctggcggcggaatttccggacgtgacgtttcaggcctgctcctccggcggaggccgcgccgactacgggaccatgcggaggcatcatgaattctggacgtccgacaatacggacgcctgtgaacgcgtgttcatgcagtggggcataggccatttgttcccggccattaccatggccgcccatgtgacggcctcccccaaccatcagacgaagcgcgtcacgccgctcaaattccgttttgacgtcgccatgtcgggccgtctgggattcgagcttcagccctgtgacatgacgaaggaggaagtggattttccaaacgggcgctggcggaatataagcgcatccgccccgtggtccagttcggggacctgtaccgactatcttccccgtatgaaagccgggtggcctccctgatgtacgtgcatgaaaaaagggccgtcgtcttcgcctggctaatggacaaatggctggcggattccccgccgcccctgcgcctgaaaggcttgaatcctgccgccagatacctggtcagggagatcaacctggatgaaaacggccccctggccaacgtccatgaacgggtgcttggtggtgattttctgatggacttcggaatccgcatcaactggaaaaatgccttccagtccgtctgcatggaagtgacggaaacggggtcttaaacttccggctggtggcaaggaggtaaacggcgctgatccgcaatcgatattcctttttccgtgaagcatggcgcccggagagaaccgccggagacgcggtctttccgggtggtgaagtttgcgccttgggctaaacgcccaccacgccgccgatggtctggatgatgactttcgcgatgatagtcatcaggatgagggccacggggtaggcggtggcgtagctgaccacgggagcctgggagtccgtcttgctggcgatggcgcccagggccggggtggaggtcatgccaccgcagatgccgcccaggcattccaggatgttcatcttgaagaccttcatgcccacgaagtaaccggcgaacatgccggagcaggtgacgatgacgcccatgatgaacacggccgcgccgtgcgtggctacggtggtgaccaggtccgcgccgcccttgatgccggcgtcagccaggaagaagaccaggcccaggtcctgcaaaagaagtcgggtggggcgcgggatgtaacccacgatggggcccaggcgcccgaagtggccgagcagcagggccacaatcagcgggccgccggcaatccctagggagatgcccaggccgttacccagactgaagttgaccagccccagaatgataccgagcgagaggccgaacccgagggaaagaaggtccgtctggttcatgtcctggctgcggtggccgattttgtccccgtacttggtgaggttttccggagaacccaccacggtcagcacgtcattgcgctccagcgtggtgtcccccgtggggacgaaggtgaagcccaggcgggagatgcgggagatgatcacgccgtccgttcgcagggttttcagatcgcggagtttgcgcccggcgtagttcttgttggtcaggatcagcttgcggcgctccttctgggagtccatggggtaggggttgtcgcatacttcccccaggaaagcgacgtcatgcggcatggtgtcgctgttgcccacgatgaggacttccgttccctcccggaacgtgtcttccggcgtcagcggcatcagcctgtcgttgcgcaccacgcgggtgaccatgcagtgcaggccgtccagcagcttgcagtccgcaatgttctggccgatcaggttgggctgcgtgacgcggaccaagcgtgagatgatgctggcctcctgcttggagtgcatggccttggcctccttgttcaggtcaaagtgcagcaggcgcgggagaagctggacgaagaggaccacgcccaccacgccgaacgggtaggcaatgccgtagccgatgctgacgccgcttccggaggctcccggcaggctttccgtggctgccgccagggccggggtgctggtgcacgcgccggcgaagatgccggaggaaatccccgcgggaacattgaaccagatgccgaagaggcaggtgaagagggctgaaacgcctacaatcacggcggacatgaccgcgagcttgcttccctgcttggcgatggcggagaagaagcggttgcccgcgctcaggcccacgcagtacacaaagagcgccaggcccagctggcccacgccgttggggatggccaggcggtagtggccggcggccagcgctacgaagagaacgccggagaggccgaggttcaggccgtatattttaatgctgccgagggcgatgccaaagaagatgattccgaagagaaccagggtgttgtggttgagcaggatgtcgaacatggtcggctgggtcagactttgcccggagcgaactcgaagttgcggaagtggacggggatggaggccggctccagcctggtccggtcaaacaaccggctcggcgcggggagagagttgagtgtttgtttggtcaggtagaaattttgcacgaagtagttgcccccatacccgcgctttgtcaagtcgcgtatgatgttgttgacgtgatcttccgtcaataaatcgggatggacggtggttctgacttcaaaggcggtttgggaggcgatcaggtagtccagagttgcggaaaaggaggggaaaaggtcgggcctgccggtgacggcgccgtattgttcggggggcgccttgtagtccagggcgatgtagtcgcaaagcccctcttccaccagcgctttcaccacgccgggcctcgtgccgttggtgtctattttaatcgcgaagcctagctgccgtatctcgcggcagatggggataaggtcgggacacagcgtgcactcgccgccggacaggactaccccgtccagaaatcccacccgatctctgaggaaatcaaggtagtccgtccggtctccggcaggagagcccgttcctctgaccagggagacgttgtaacagtactgacaaaacaagttacagcctctcagccagaagatgcaggccaccttgtttggaaaatccagcaaggtgagcggcgtgatgtccgctatgccccggcccgttcccattgacttcgcatatgttattgggaaaattaccgcggctgttccgtttgggcggagcaggagcagggacggtccggttccacgaagtggacgcggtcgtggaattcgccctgtttgccggcgttaaaggtttccacagggcggtgatagcccatgacgcgcgtgtaaacggtgcagcgggtacggtcctgtgcgtatttgcttaatatttcctgtttggtcattgtcgtattgatggctgggttttgaaacgaggcggctggttgaaaagggttattcatgcctgtggatgtggagcagctcttcatcacagaaggggcagtactggtgctccccgcgcaggtagccgtgcttgtcgcagacggagaagagcggggtgacggtcaggtacggcatgcggaagcgggtcagcaccttgcggacgatgtcccggcaggcttccggggagctgatggcttcattcatgtacatgtggaagacggttccccccgtgtagcagcactggagttcgtcctggagctggagcgcacggaacaggtcgctcgtgtggtccacggggagctgggagctgttcgtgtagtaacgctgccccacgggcccggcctggaggatgtccggatagcgcttctggtcctcccgggcaaagcggtgggtggtgccttccgcaggggtggcttccaggttgtacaggttgccggtttcctcctggtactcctgcatgcgcaggcggatgaattccaggatttcctccgcaaaggtcctgccttcctcggaggtgatgtccatcgagtcgttggagaagttgcgcagcagttcgttcatgccgttgaccccgatggtggagaagtggttgcggaaggtgggcaggtagcgcctggtgtaggggtacaggccgcggtcgtacatttcctggacgaaggttcttttcttttccaggcaggatttggccaggtccagcagttcccccagccgggcgaacagtgcttcccggttctgcttgaacaggtagcccagccgggccaggttgatggtcaccacgccgatggagccggtcatttccgcggagccgaagaggccgccgccgcgcttgagcagctcccgcaggtccagctggaggcggcagcacatggagcgcacggcgtccggcttgtaggcccgttcgtccggcacgcgttccccgttttcattcacggtgtactggctgccgatgaagttctggaagtaggaggagccgatcttggcggcgttttcaaacaggagcggcacgttttccccttcccagtcaaagtcttccgtgatgttgacggtggggatggggaaggtgaagggctgcccggtgctgtccccttccgtgagcacctcgtaaaaggccttgttgatcaggttcatttccttctggaaatgcttgtaggtcagctctgtcagcttgttcacgccgcgttcccgcgccagggagagcaggcccgggtcctccaccccttcaaagaggtgctccccgccgctgaagggggcctggtcccgcaggtcccgcggcacggtccagtcgatcgtgacgttggtgaagggggactgcccccagcgggagggcacgttcaggttgtagacgaagctgcggatgtccttcttgatgcgcgtgaaatccgcctggtccttgaaggcgtaaggcgccaggaaggtgtcaaaggagctgaaggcctgggctccggcccattcgctttgcagaatgcccagaaagttggccatctggcccagtgcttcccggaagtggcgcggcggcctgctgttcacgcggctgcgcacgccgttgaatccttcgttgagcaggttgcggaggctccacccggcgcagtacccggtcaggcagtccaggtcatgaatgtggtagtccccttcccggtgggcggccccctcccgtgcggaataaacctggtccagccagtagttggcaatcacctttcccgccgtgttattgatgaggccggcgttggaatacgtggtgttggagttggcggcgatgcgccagtcgctctggccgatgtattcctccaccgtctgcttgcagtccacgtacgtgttgccggaatagaggcccccgagctgttcgcgctgcattttgtgcaggaagcggtaggtgatgaaggtcttggccgtgtcaaagtatccgcagcggaacagggcgcgttctatcatgtcctggatttcttccacatgcgcgcagtcctgatggctcagcttggcttccacttcttcgtaaatggaacggttgtaggcggtgccggagctgtggaacgcgttcttgacggcttcctcaattttgtagccctggtattgttccttttttccggaacgcttgatgatgcttgttgccatggtgggtgtctcgcttggaagggatgatgaccgctcatccgcgagcctgggcaaaagcctggaaaaatcataggcaggggccgccgcatgcgtgcatttttaacaaggggcacgatgaggacctgtgcgtatgttcatcctgtccgcgggatgggatacgggggcatcaggtcgtcttctggcttccggtgcgacatgtgatggggacttcccgactgctggcagtcagtgtccggtccatcgtctaccggttacagcggcgcgtccgcgacggattttcaccgtcttccgttacctgcgctgaaacgcaatgaaccacagaaagagagcccccgcaaggaaaatgtataaataatgtattaaatatttataatgatacaatatgttgtatatatgctgcagggaatggttgataacgcggcattcccttccgtcatggcaccatatgtgcccttgcctcccctttccggggaccgggggaaaacgggacaggccgaaaagggaagattcattcctcacggagaaatttcagcgcggctttttccgtaccagtcaaatgaatttcttttccttttcaaaaaacggatggcgtaaatccttcctgctgctggttcttcccgcgctttctgcggggagccccgcttccggcgctcccgcggactggaatgaaaagaccatccgggataatctccgcctggtggcgaaatggcaggcggagcatcccagaaaacgctcgccgctgcactggacctacggcgccttttattccggcctggtgcagtatggcctggccgtcccggaagggccgggattgccgctgctgaggaaaacaggaggggaacaggaatggagaaccctgaaacggcattaccatgcggacgatcacgccgtgggccacgcctggatggagatggcgatggaagacggaaataccgctgcggcggagaaaatacgcgccgtgctggacggggtgatgaaccggccctcctccgcttccctccagttcgggactcccggctgccaggaccgctggagctggtcggacgccctgttcatgtcccctcccgtgttcgtgaagctggcggcctataccggagaccgccggtatctggaattcatggacagggaatacaagctcacctgcgactatctttttgaccggaaggaagggctgtttttccgtgattcccgttacttcaccattccggcggctaatgggaaaaagatgttctggagccggggcaacggctgggtgattgccggactgccgcttattcttcaggacatgcccgcggactggccttcccgccccttttatgaggatctgctcaagcgtatggcggcatccctgaaaaaatgccagtcgcccgacggttcctggcacgccagcctgctggacccggaagagccccccttgaaggagatgagcggcaccctctttatcatgtacgggatgctgtggggggtgaaccaggggtatctggatgcggatgaatatcttcccgtcatccgcagggcgtggaaggccgcctgtgattccgtcaacgcggaaggcgcgctgggctgggtgcagcccattgccgacaagccgggccattattccggggaggatacggaagcatacggcgcgggcgcctacctgatggccggcaccgaactgcgcaaatacgtcattggccgggaccatccgcagagaaagactgtaaccgtcacgaacccactggccaagttccgtcctgctgaaaccgtgtcggtgccctggacgtccggaacttccgggaatgccgccgcccttcgcgtgtttgacgtccgccacgggcgcgtcatcccgcaccaactggcggatacggatggagacggaaggacggatactcttttgttccagagcaatttccggcccggaacggcccgtgatttctggattctgaacgattcctccctgaaggcggctccttccgcggacgtctgtttcagccgcctggtcccggaacgcctggatgatttcgcgtgggagaacgatcttacggcgcaccggatttacggtccggccgttgccaggccggcccctgagggggagggcctggtttccagcggaacggatgtatggagcaagcgcgcgggtgctcccgtcatcaatgaattctacaagcggggggattaccaccgggatcatggcaggggactggacatgtacaacgtagggccgggacggggctgcggcggcattgccgtgttcagggatgggaaaccgcatgcatccggaaactgggccagcgcgcgggcattgtacaacggtccggtccagaccgcttttgaggtggtttatgcgccgtgggacattggcggcggcgtacgcgtggcggagacgcggagggtggctctggacgcaggaagccgtttttccaaagtccgcagcaccttgaccatccggggggcggaaacggtgaaggccggcgtgggaatggataccggaaagggcaggaatgattatgaaacggtcacgaaggaccgggaggacggcggcttgatgacggcatggagcaggccccggaagaatgacggatgcctgggaaccgccgtgatagttccctggggtccggaaggcggggcagtggactcggaaggctgtacctactggatcagggaggcggcgaacggaaagccctttgagtggtacatgggggcggtttgggacaaggcttctccgttcaaatcctctgccgcctgggaggcggaggcacgccgcgtccgggagtgcgtcaggcatcccctgcgagtccgggtacggtagagttcgtcctatcctgccgttccccgcagaggatgacggcagcttccatcttttttacggaagcggctgcggcggtgcgggagcggccagccattccgccagcacttccggctggaggggggccggggtttcccgggcgtccggagaggccagattcaggccgttccggacgacttccgaccggatggaggccagggaaaggagggtgtggaaaatgtggtcgtgggagacggctttcaggcggttggccttcagcgcgcgcaccatgtccgggtagcgtgaggcgaaggcgtccgaataccacacgaacatggcgggacggtaaacaggcggcagaacatgcccctggaacatttttccttcctcgcccagcgccacgccatggtcggagcagtaaaaataaatggccggcctgtccttcaacagtgcaatcatgcggtggacggaggcgtccaggtccacgatggaattgtcatacgcattgacggtttcttccagacgggccttggggtcgtccatgttgcaggacgccggggtaaagcgttccgcctgtgcggggtagctgaacgccatgtggctgccgttgttgtaaatgacgtaaagctgtttttcccggccgtgccgtttcagggattcctccatgaccagggaggtgcgttcctgcatcattccgggcgtttcgtgcatgggcggcgtctgcttccgttcccggcagttccgggtcaggatgcccagggaatagtcatggatggagtctccgcacaggtccatgatccggacggtgcggaaaccgtgcttgttgaacaggtcaatgaaggaggaatgggcggggcggcggcgggacagttccgcatccgtaaacatgccgatggcggaaatcctggtcacgatgccgaaggaggtggcgtgggggaaggaaacgacgttgggttcccgggaaagcaggggcatcgtgttctggtggtagccgttgagggaaaggtggtccgcgcgcacgctctcgcccatgtggaagaccacggccaggtcgtccggagcgtcgcatccggagaggggttccgcgcaggacggcaggttccggagttcattgaaacggcttgcgtcctgggtgacgtattcgtccgccagcttgtacgccatcacgaagtccacgaggggccagcccttggccttgtcagaggtgtagtaaaggtaaaggggttccgagctgtaggaggtggccggaatgcccagcagcagaaagattccgtacaggctccagatgcacgccagcgcgccccacgtggccttctggcgcagggaacggcggctccagtaaatggccaggtaaatgaaggccgccagcagcagggccccggtggcggaggcggcggtgcagaaggcgcaggcttcccggaagttggtctccgccatgctggaaaggacggagaggttcagcgtcagcccgtaccgcatctgcatcatgtacaggcccgcgttgaacaggatgatggccggaaggacgacgtaggcggtaaagcggtatttcaggcagagaaggatggtgccgcagagcagggaggcggaacaggcgatgcccatgcagctcatcagcacgctctggccgtcattgagcacataaggattgaccaccagagccgccgcgagtccggctgcccacaggcagcgcatgcggcgcggaaagaacgcggcgcgaagagcctggaagacggcggaaagagcgcctggccggcctgcgtaccgttctgcggaacgggtggatgcatggggaggggtcatcgcaaagaaaggataaagtattcttcctgcttgaaggggtgagccattgtaagggtttcacggtgatgctcaagcagaatgtggcggaacgccttttcatggaagggcccaggcaggaaaagggaaccgccgttgaaacggcggtgccgatagcatccgccattttttgcgcttggggcttggtgcggatggcggcgcaggcaattggcgggcaattggttgtgggggcagcccgtccggcatgcggggttgacggaaagaggggactttccggttgtagttgacaggcccggttttgggagggtatagggaagcttatggaaaatcagcccgttgtgctgcaatgtcctcaagctgtgaaaggagccgcctgtatttgtgtcgtgggggccgtgtcattgccctgggtcgcagcggcttccggcctggggcttgttcccggaaccgtgctgggcgcagccgggattttgctgggggtggcttccgttgcctgcgccgttgtcgccttgtgcagaaaatccgtcgcattcggcatcatcatgattttaatcgggatgctcgcctgcgccgtagccggaacggaatgcatgtatttaatgttttaaatgaacaagtccatcaatccgggcattcaaaaaaggtccggggccggatgcacgtgggaggagaggaccagggccacccggacagtcggaagtggagaaaagtcttgaagtccggaaaagggccggaacacggttctggaacggcgcttgcggaatgaccggaagggaaaagccggcgatgcttcttctctggccgcttccccagatggcagcggtttccggcctgtaaaaacccgcccggaatgttccgggcgggttttgtgtgccatggatggcctccggtgctcagacggagtttacccgatgacgaggaatttttcagccttggtgccgcagagggggcaggcgtccacgccttccagagatttgaaggtgtccccgcacaccaggcatacccagtattgcctgggcagggcgctggtgtctccgttttccagggccttgagggcggcggcataaaaatcggcgtgttccttttccgcttccgtggcccacgtgaaggagcggacggcggccttctggccttcctcttccgccacggcgatgaattccggatacatgctttcgaattcgtgggtttccccggcgatggcggctttcaggttttccgcggtggttcctacatgaatctggatatcgatggggtccatcgttgcgcccagcttttccagaaccttgttgtggttggcggcgtggacggattccgccttggaggcggcttcaaacaatttctgaatgaggggctgcccttcctgggcggctttggcggcataggctgcgtaagtggcggaggcggtgctttcgcccgtaatggcggctttcaggttttctatggttttagtcatcgggaatgaatttataataattctaaaaagatgcaactgaaaaaatcctccaagggaagaaaaaacgcaaattcccctttctgcggcatcacggggagccgttacacaatgattcattgacgcatgcatggcgagcctgtacaacggaaacgttatgaagagcattgtaacaattagttcggcatgtgccctggcatttgcaggtatggcttccgcccaggatgccccggctccggcacccgccccggccgctgaaacccctgccgcgcccaccgcgccggccgctgaagtttccaaggaagcgaaggaagccgctgaccagatgctggctttgatgaaggaaatgtccgccacgctcagcacggtgaaggacaaggccaccgcagacgcggctgctgaaaagatggcgaagatcaatgaaaagggcgaagccctttccaagagcgcccagaaggtccaggctgaaatggatgccgccatgcaggcgcgccaagccgaactcctgcccattttcatgggcatgatgaccgacatgcagcgcttgcagcaggccgacttcttcggaagccaggccctgaaggacgccatgaagcagaccggagcttccggtcccgaagaaggcgttgaagtggaggaagaagtggaagtggaagccgttccggcccccgctcccgctccaaaggaagctcccgctcccgccgccaagtaactttctttttcaggattgatcctcctccggcatctctgggtgccggaggattttttatggggaggccgtcctgaaaagcctccgtggcgtgcctcaggcctctgcggcagctgaaacgcatgcgtccgacaggatgccctgcttcagggaacagagttcactgccgctcaatttcaggtttgactggcgcaaggggctgcggcgcttcttgactggacggggcaacgccgcgggcgtattgcgcggaacgcttgaagacatccggaaacaggcaggccgcctccgtttccggggcggcctgcgggtgagtgatcggttggcgccggggcttttatttggcctttttcttcctggcggcggctttggccggcttggctgccgttttggatgccttggcgggtttttctgccgggcattcgttgacggagttccaggaccagtcccatttgtccacgttcatggcgcaggcggtcaggagcgctacggaagcgtccaggtcatccttgtgcgccatttcaatgacctggtgaacgttgcgggtgggaacggagatggccccggcaatggagccgcccggaacaaacttctgcatggctccggcgtccgtgccgcctgccggcagcatttccacctgccatttgatcttgttggcgtccgccatggccttcatgaacttcaccatgcggcggtccgcaatcacggagccgtcatacagcttgatggcggcacctgcgcccaggtgggagacttggtcgtgcgccggggtgccgggaatgtcgcaggcgatggtgacgtccagggcgatggagaagtccggctggatgtccagcgtgccggcctgcgcgcccctcagccccacttcctcctgaacggtgaaggcggccacgaagttgcaggagggcttctttttggaagccttgatggcgcggagggcttcaatcagcacgtagcatccggcgcggttgtccagggacttcacgttcacgcagtcccccatttccaccaggtcgcgttcacgggtgacggagtcgcccacggagacgtatttttccacttcctccttgctcatgcccaggtcgatgaagaaatcggtcacttccggcagcttggtgcgttccgccggggacatcacgtggattggcttcacgcccatgacgccgatgaggtcttttttgccgtggacgatgacgcgctgggccgtcagcgtcttggcgtcaaagccgcccagggggaggaatttgatgaaccctttgtcgtcaatgtgacggaccatgaagccgatttcgtccatgtgggcggcggccatcatggttttttccgtatccttgccttccacgatggcaatcacgctgcccaggttgtccacccgcacggcgtccaccagaggggccacttcctgaatgatgaaatcacggattttgtcttcaaaccccggagcgcccggagtcacgcaaacctgacgaagcagttccaaattcataatgccgccaatgtaatggttttcgtgaaggttggctagcccataatgcggcctccggaaggaggctgcgcgggggccttccctccgtatttaccggcgttcccgggtaatgacggcgtccggctgcgcgggggccccgttgtccggcctcttgtagttgacgccatgggcgtccaggaagggaagctggcggtcgaggcgtttgcggaagtctttctcgtttttcagctccttgggggtccaggctacttccgccagcgccagggcgcggggaaaggcatggtattcccatttcggcaggttggggatgtactccgtccagatgttcgcctggcagcccagcacctgtttttcccgttcccggggcgttccctgcgggacgggctccagcccatagacgcgctgccaggtcaggttgtcgtcgttgatggtttcatactccggggcggagggtttgccggggccctggtcatagtcgaagtacaggtggctgttgggcgtcatcaccacgtcgttgccctgttccagggcatgccgcgcgctgttcggcatccagctccgccagaccatcatggtggcggtgggggagaggcctccttcctggatttcatcccagccgatgagcctcttgccgtggctgttgatcattttttccacgcgccggataaagtagctctggagttcgttctcgttggcgaggccgttgtccttcatgacctgttgcgccgcggcggactgcttccactggtccttgggagcctcatccccgccgatgtggatataggggctgtccgggaacagggcgcacacttcatcaataacgtcttccagaaaacggaaggttttttccgtgggggcgaaggtgtagggaagcacgccccaggtttcctgcaccttgggcgcgaagcccggaatgtccgtgttgcccagttccggatacgcggcgatggcggcggaggcgtggcccggcagttccacctccggaatgacggtgatgccgcggtctttggcgtactggaccacttcccggatttcatccgcagtgtaatggccggagtacggggtgccgtccgccttgttgcggctgccgatgacgggggactgcgcccgggtacctcccacagccgtcagcctggggtacttggcgatggggagcctccacccctggtcgtccgtcaggtgccagtgcagggtgttgaatttgtacctctccatcaggtccaggatctttttgacgtcccgcacgggcatcatgtggcggcaactgtccatcatcaggccgcgccatgaaaaacggggctggtccttcacgtccagccggggcagggccggagctccgttcacgtcggaagcgacgctttgcacaagggattgaagggcgtacaaagcgccgttcacggaaccggaggcaatggaaatggaatccggcgttacggcaaggcggtagccttccctgcccagggacgcgtcttccgtaaagatgaggtccgctccggtttcaaccagcgccgttttgatcccgttgtcgcggaaaatccgttccgcctgtttggaaaggggatttccttccgggagccggacgccgtctttcagggaaaatccggcttctccggttttaacgcgcatggcggcgggctggggaatgatgtggggcgtcccgggaaccggagcggacggggcgccccagcagagggaggataagctgaaagccatggcagggaaaaggtgtctggaaatcatagcgtaactacgtggtatttcccgaaaaaattctgttccggcgattgtttttttcaaatgccgggaaaggccggcggataaaaatagcggttgctccgcctgtgcacctgtgagagtatccccgccctatgagtgaagccgcttccccccgcatcaggaagacgatggtttttgtgctgctggctctctttctgggccagttcggaagcggcgtgtatgatctcattttcagcaacttcctgcgtgacgcccagcatctggacgtggagatgcgcgggttcattgaactccccagggaactgcccggcatcctgtccctttttgtggtcagcctgcttttcatgttcaatgaggtgcgcatggccggggtggcgtgcttgctgatgttcggcggcatgtacgcgctggccttctgcggcgccggaaccagcctgtgggcgctgtctgcgtggattctgacggtgagcctggggcagcacattctgatgggcatgattgataccatcgtcatccatacggcgaggccggagaaccgtagcctgaggctcggccagatgaaggcgctggggacggcggccgcgctgctgggcgcgctgtgcgtatggatcaagtggaaattcaaccagtcttttgccgtggactttttcgttacgggcggcgtgtgcctgctggcgttcctgttcctgagccgggtgaaaacgcccgtctttccgcagcagcgcggctggcggcagtgcttcgtcttcaagcgcaggtatgccgtttattacgggctggaaatcctgcacggcatccgcaagcagctttatctgaccttcggcttctggctgatggtcagcacgctgggccagccgcccggatacatcggaaaaaccctgctcattgccggcgtcatcgggctggtcacgcagcccctcatcggctggagcatcaagcggtatggggaacggaaggtaacgattttcgacagcattgcgctgtccctcctgtgcctggcgtatgccttcgccccggagctgctccccctgcactgggccgtgggcgtggtgaccgcctgcttcgtgctggacaacctgctgttcgccctgggcatggcccgcagcacttatgtggcccgcatctgcgagaagccggaggacatcacgccgagcatttacaccgggctggccatcaaccatgtggcttccatcacttacggcgtgctgggcggcgtgatctggatgaatacgggcggtccgcaggcggtgttcctgataggcggcctggctaccgccggggccgggctggtggcgcggcacatggatgagcaggggcggaacggagcctgacagaagttctaacgcccgggtgcgggtttgaccgtcccttttttgaaggccttcatgatcttgtggaagatgtccgtattttcgtaaatgccggtgaacgcgccgcttcccgcgccgaaggcgtacaccggaacggccatgccgtcgtgattgccggagccgaactgggcgtttatttcccctttctcccggttgccgcctgtgagtgcgaacgcgcccgtgttatggtccgccgtgatgacgaccagggtgccggggtgttttgaagcccagtccagcacggctcccgcggcccggtcgaagtcgagaagctcctccatcatttcttccaggttgttgcggtgggcggccttgtcgatgttggagccttccaccatcaggaaaaatccctcgggattacgggatagggtatccagcgccttcagcgtggcccggcgcagaacgtctccccgcctggagggcgggggaagattccccggagcggtgacggccagcgtttttccgggcggcagtgcggcggcttcctcccagctgcgggcgatccggtagccctgcgcctgcatctccttgaaaatgtccctcccgtccggcctttgcgtgaaatacttgccgccgccgccgaaaatgaagtcggcgcgggaacgggggtaatccccgatgatgccgtaggaatccgaccttttttcattattggcgcagaaagcggccggggtggcgtcgttcagctcgcaggtggcgatcacgccggtggatttgcccatgtccgccgccttgtccaccagggagtccagcttgttgcccctggggcacacggccaccctcttgtagagcgtcttggtacccgtcgccatggcggtgcctgcggcggcggagtccgttaccagcttgtccgcgcaccatgttttggagatgcccgtcaccgggcagttttcaatgaacaggcgcccgcggttggccgcccaggccgcggaaaggtgatggatgcccatgccgtccccaatcatcaggatgacgttggtggcagggaggttccggtcaggctccggaatttccgccacctggtaggggcgttccagaacgaagcgctgggtctccgccgccggaagcagggacggcgcaagcagcagggcacaggcaagggagcgcaggagggaatacatgctgccactttcccgcccgcggcggaacaagtaaagaggaaaaatgtgccggttccgcgggaaaccggcacaaatgctgttggcggccttatttgacgtccgcctgtttttgcaggatgtcccggatctgttccagcagaacgacgtcatccggcttgggcgcgggggctgccggcgtttcttcgctcttgcgcctcagtgagccgatgagcttgatggccacgaagatggagaaggcgatgatgatgaagtcgatggtcgcctgaagcaattccccgtatttcaattccacgtcccccagtttcaaggtcaggtacgccaggttcacgccggaggtgaggtagccgatgatgggggtgatgatgctggagacgaagacggaaacgattttgttgaacgcgccgccgatgacgaccgccaccgctaggtcaatgacgtttcctttaagggcgaatgccttgaattcctccagaaaacctttgggattgaaaaaatgtgccatgatggattgctgctggttgtagatttattctggcggcaaaaggataaaagaaaagaaaaatgaaatgccgccgaacagagatatgactacccgccgggataaaatgtgagaatcatgacgtggctcccaaaaaaatcatttacagacggggccagaagcgcaaactacacgcgtattaccttagcttatgaacacagaagaaaaactcaaccggtacgtactccattcctatggccgttatcccatggctgccgtccgcggggaaggctcccgactgtgggacagcacggggaagtgctatctggacttctgtgccggcattgccacctgcgcgctggggcattgccatcccgtggtaacgcaggccctgcaaaagcaggcggccacgctggtgcactgctccaacctgtaccagattccccagcaggcggatctggcggaattcatcgtgaccaaatgcgtggagcgtccggggaaggtctttttctccaacagcggcgcggaatccaatgacggcttgatcaaggtggcgcgccgctacggccaccggaagccccaggcggacggcaaaccccgttatgaagtgcttacgttcaacaaatccttccacggaagaacgctgggcagcatgtccgccacggggcaggataaaatcaagataggctttgaccccatgctgccgggattccgccatctgcctttcaatgacctggaaacggcccgcgaagccatcaggccggaaacagtagccttcatgctggaaaccatccagggggaaggcggcgtcaactgcgtgactccggaattcctgcgcggcctggcacaattgtgccaggagcacgatcttctcctgctgatggatgaagtgcagtgcggctttggccgttgcggcgacatcatgggatggcgcgccgtggctccggacgtggagccggacggcgtttcctgggccaaggctcttggcggcggttttcccatcggcggcttctggatttccgaccgcgccattgacgaccagggcacggagcttgcctccatcatggatcccggctcccatggttccacgtatggcggcaatccgctcggcaccacggtcggcttggccgtgctgcgggaaatcgtctcccaggggctcccggaacgggcgcggcgcctgggcgcggaaatccgcgcggaaatagaatcctggaacctgcccgtgatccagggcgtgcgcggcctgggcctgttgctgggcatcggcctcaatccggagatggtggacgcgccggaaggcaagacggttgccgccgtggtggtggaggctctgcggcaggagggcctgctttccgttcccgccgggccggaaaccgtccgcctgctgcctccgctgaacgtgagtgaagaggaagtccagcaggcgcttgccatcatcaggcgcgtgcttaagacatacgttaaatagaactcaaccccgtttgctttattgtcatgaaggaagaagccatcaaagcccccggcagtacgataaggcaatattccatcatgctccagaaccgggtgggggcgctgtccgccctcctcggcctgctggacatgcacggcatcttctgcctggggttcagcatgcacgactgccatgaggcgaccattgcgcgcctgattgtcagcgatccggaacgaacgtcggaaatctttctggaaaagggcatctgctacacggagtccgaggttctggtggcggttctccgccatggccccgcggacctcaagaagtgcctggatgtgctgtatgccgcggaaatgaacgtcaacttcctgtaccccctgatgccctgcatggcgcggggctccctggtcgccctccatgtggatgacctcaacttcgggcgcaccgtgctgaattccagcggcatcaaggtcctgttccagcaggatctcagccggtaggaacgatggtttttccggcctttccggtcacccggccaaaggcgttttctccaagcgcatcaagggtttggcgcgttttttcggcttgacgggaggggaaaacatggtatggtacgggccgcatggcaaaagtacccgtaatcaatcttcgcaagggacacgcggttaatcataacaatgacgtttgcgtcgtggtcagcatggagcacaagtgccccccccgcatggcctcctacgtgcaaatgagcatccgcagcatttccaccaagaaggtatataaccttcgcctgacttccaatgaatccctggaaggcgtgaacctcgcccgtgaggaatatgagttcagctacattgacggcatgggctaccacttcatgaaccccgatacgtacgaagacattaccgtgtctccggacatcgtggaacccgtcaaggattacctgatggaaggcaacatctacattctgcttttcacggatgagacggttgtttccgtggaactccccgccgccatcaccatggaagtggcggaagctccggaaggcgtcaagggcgacagcgcgaacaacgtttacaagtccgccacgatgaccaccggcttggtggtgcaggtgccccttttcatcaagcccggcgaaaagatttccgtaaagacggaagacggctcctacctgggccgcgtgaattaaacgttcccttttcctgttatttgaagagtcccgtccgggttttatccggccggggctttttcatgaggggacggcacggaaaaagaccagaagacgggccggagtacgggctttacatttgaagccgcgtccagtaagccattctcattgtaatattttactccatgaaaaagtttattgtcttgttgtggatagggctgctggccgcttttctgccggcggattgtgccgccgcagtgaagctggcctgtctgggggacagcatcaccgccgggatgggggttaaaaaggaagactgctgggtatcccggattgcgaagaccctggacaggaaggcggaagtaggaaacttcggcgtatcggcgcgctgcctgctgttcaagggggaccgccccatcacgcgggagaaggcttatcaggacgcgctggcgttcaagcctgacatgctgttgataggcctgggcaccaatgacagcaaaaaagtgaattggagccacaaggatgattttgtaaacaattacaaggagatcattacggaattccgcaagcagaatcccaaattgaaggtatactgcctgctgcccattccctcccaggaggccagggaaggggggatcagcagggaatgcattgaaaaggaaatcattccgctcatccggcaggtggccaagagcaccaaatccagggtgatcgacctcaacaaggtgatgaaggacaagggctccctgctggtggacggcgtgcaccccaatgcggaagggcacgccctcatggcggagcacattctcctggtgctcaaggggaaggctgccgagtaacaggccgcccccgttcccgaaggcagggacttttatatgaattggaaggggttaaagaaactggatggaccttacggatacggcgaagccggaattccctttttgctctatccgttccatgcgcccctggccgttcacgttccctattcgtctagcgctttctgaaggcgggacagttccacgggagcatcctttttcttctctgtccggtagggaatggtgcccttgtggggggaatccttcttctggtatatgcggacgtaatctatttcatacttctggggcaggggcagtttattcagatcgcctcctgtggcgcccatggccaggttcaggatgatgaaatggggctgacggaagggattggcgacttccttgtaaacggcgttgacggtgttgtccaggggcgtcctgttcagcaggatgtcgtccgcatacaggcgcacttccttttcatcccagtccatgcggaagacatggaagctgtccgcccagtccgcatgcctttcctggagccatttgagcggcgtgtaggtagtgctccatttgcccacgtgttttttgggggaggcccagcagaggttggccaggtaggtggactggtagtactccatgatgtctatttccccgcacatgggccatccttccttgacgcccatggtccagaaggcgggccacatgccctcccgcgggctgaatctggcccggatttcaaaccgcccgtacagccaggaaaacttgccgcgcgtggtcagggaggcggaggtgtaatccgcttccttgcgcgtcgtctgccaattctttcccgccgggtcataatggggattggcgtgtttttcctttttgccttcaataatcagcatgccgtcctcgcaccgggcgttttccggctggtaccactgttcctccttgttgcggacgaatccgtgttcgtaattccacttggcggggtccgggcggccgtccttgtcgaactcgtcgtgccagacgagttcgtaatcggaataatccgctttttccaccaccctctcggtttttttgacgccgtccccgtgcagggtgtaaagctgggcatggaggggggcggacaacagggccgtgcaggccaggactcggaacagggtgggagcggtcattatgaagggatgaaggtgtttgttactgttacggggccgcgggcgtttttttgtcattttttattggaaaagggtgaagccgcgaaagcggcttgagaaacgggattgatgggattagtttcacctaacaacatgggagccttctttggtcccggaaaatcaaacactccgttttaacgacaatggaagaaaagaactatcttgtttccggcatgcattgcgccggttgtgctgccaaggtggagcgcgccgtggagggattggagggggtggagcgcgtagagctgaatttgctgacggggcggatgaccgttctgtttgaaaagccagattcgcccgccagggggcgcattgcgtccgtagtggagaaagccggcttccacctggcggactggcgggaggaaccgttttccggtgcggatggggaggaaagccaggggcaggaggaaacgggaggctcccgcctcgtttggtccgttctgctgctggcgcctctgatgtatctgtccatggggcccatgtggcactggcccgttccgggagggggctgggggctctggatgaatttgtgggcgcagtgcattctggcggccgcgattctgtggctgaaccggcattatttaatcaacggcgtgcgccagcttgccgcgctgtctcccaatatggattccctgatcgccatcggctccggttccgccttcctgtacgggctgtatctgttgattgcggcgctgtggcagggcgccaacgtggacggaatggaactgtattttgaatccgcggccatgatcgtcaccctgatttccctggggaaatatcttgaacgccgttcctaccgcaagacgaacgccgccgtgaaagggctggtgaagctggttccccaggaggccctggtttggcatgacggcgcggagcgcgccgtcccgctggatgaacttcattccggggacctggtggtggtgaaaaccgggcagaggattccggtggacggcgtcattgaagaagggcaggccgcgctggatgaatcggacctgacgggggaaagcatgccggtggacaagacggcgggagaccgggtgatcagcggcacgttcaaccgggccgggtatctcaaggtacgtgcggaacgcgtgggcagggactccacgctggcccgcatgatccgcctggtggaggaggccagccagtccaaggctccgattgcacggctggcggaccgggtgtgttatttctttgtccctgcggtgattgcgattgccctggtgtcgttggttgcgtggctggctgccggggagggattttccttcgcccttgccagggcgattgcggtgctggtgatttcctgcccctgcgttctggggcttgccacgcccatcgccatcatggtagggacgggcaggggcgcgcggctgggcatcctgtgcaagtccgccggagctttggaggctttgagccgcgtggataccgtcgtttttgacaagacgggcaccctgactgaaggggagccccgtgtggtggccgttctgccggagccgggcatgaatgcggatgaactggtggaaatggcggcggctttggagcagggatcggaacatccggtagggaaagccgtttatgaacacgccaggctgctggaactccccatccgcgccgtggcggatttgtccgttgtgccgggccgcggcatttccggcgtagtggacggcgtgccctatgcggtgggcaatcccggcttcatgcaggacaagggcatctcctggaaggaggaggaaggccgcctccgggagttcatgcggcagggcgcgtccccgctgtatgtagggaggggagaccgtcctgcgggagtgatcatggtggcggattccctgaaaccggacagccgggcggcggtggattatctgaagcggatgaacctgcgcgtggtcatgctgacgggggacaatgccgccacggcgcggcacatggccggggaactgcatattgatgaagtgatttccgacgtgcttccggatgagaaggcctcccatgtgatgaagatggaggaacgcggggacaaggtggcgatggtgggggacggcgtgaacgacgccccggcgctggcctgcgcccgggtgggcatctccatgaagtccggaacggagctggcgatggagtcctccgacatcgtgctgatgaagagcaatcccgtgggcgtggcggaagcccttcaactgggccgcaccaccctgcacatcatcaggcagaacctcttctgggccttcttttacaatatcatcggcattccgctggccgccgggtgcctgtatccggccttcggccttacgctgaatcccatgattgccgccggggccatgagtttaagctccctgtgcgtggtgttcaattccctgcggctgcgcggcttcaagccccgtctggaaaaataaggcggcctcttcctttttggcgccctccgttcaggagggctgcagcagggcctgggccagcgtgcgggcgtggtccccgccgccgcccagcatgcggaccagctcgtctatccggtcttcatggctcacctcccgcaggcaggagatggtgcggttgcccgcggaagccttctggaccaggtagtgatgggaggccagggccgccacctgcggaaagtgcgtgatggagatgacctggtgcctgttcccgagctgctgcatcttgaagccgacggcccgcgccacttccccgcccacattggcgtctatttcgtcaaataccagcaggggggtggagtccttgtgcgccagggcgcttttaatcgccagcatgatgcgcgccagctccccgctggaggcaatcagccggagaggcttggagggttcgcccggattggggccgaacaggaattccaccgtttccattccctgggagccgggttcctggaggggggagagccctacttcaaagacggcctggcggaagcccagttcccgggagtgcctgacgatggaggaagccagtttgggcgcggatgcctgccgcgctttggtcagggcctgtccggcggcgtccacctgcttgcgcaggacggccatggaggcccgcagttcttccaggcgttccgtgcggtgctcgatgcggtccaggcggtgggccgcctcctccctccgggcgcagacgtcttcaaaggaagggccgtatttcattttcagggattccagcaggttgatgcgctcctccagttggaagagctcccggggatcacaatccagctcggaggaataatccgccaggcgtccttcaatttccttaagctccagattcacttccgccagcggggccagccacgcggctgtggaggcgtccatgcgttccagttcgtgcgccgcccgggtcagttccctcaactgggaacccaggccgggcacgtccgtttcctccagcatggcaagcattctggaaacctgttcctgaagcctggtgccgttgcgggcgcgctgccagcgttcttccagcgtgagcacttcctccggcgtaaaggcggcggcgtctatctcgtccacctggtggcgcagcagctctatttcccgcgcggtggccgcttccgcatgctccaggtcgtcataggcccggcgcgcgtcctgccattgccgccacgcgtccgcgtaggcgtgcagcaggggggcgtgctccccaaaggcgtccagcagggaaagctgcctctcctgggagatcagggagcggtggtcgctggggccgtgcatgtccaccaggcaggcgcccgcctcccgcagcaggttcagggtgcacgggctgtcattcaggaactggcggttggccgtggaggaaatgatgcgcttgatgatcaggttgccgtcttcgcagggcggcacgccgtgttcgttcagaatggcgtgcaccggggaggagtccggcaggtggaacacggcctccacgctgcattgctgttctccggaccggatgagcgttttgtccgcgcgttctcccagcgccaggcgtatggcgccgatgatgacggatttgcccgcccccgtttcccccgtgatgcagatgaaaccggagctgggttcccagagcagctggtccacgagggccaggtttctaattttcagcaatgtaagcattcgggctttggattttgaatgcattatggcatcatttgctctaaacgcaatcatgacctctgtgatgaacattctctttctgggcaccggaacgtccaccggagttccgcagataggttgctcctgtgcggtctgcacgtccccggaccccagaaacaagcggttgcgttcttcagtttacgtggaggccgcgggcacccgcattctgctggattcctccccggatctgcgtcagcaggccctgcgggaaaacatcacggacgtggacgccgtgctgtacacgcacgcccatgtggaccacgtgggcggctttgacgatctgcgcgccttctgctggcgcaggtccggcggcctgcccctgtacgcctcaccgcagacgatggaagccctgcggaccatgtacggctgggcgtttgaaccgaaaccgggccggagcggctacgtcaggccggaacctcacgaagtgagggagccgttccgcgtagggagcgtgctggtgacgcctcttcccgtaatgcatgccggggtggagacttatgcctacgtgctggaggcggaagggcagcggctggcatacatgccggatgtgaaaagcattccggaggcctccctggaggccatgaaaggggttgacctgctgattattgacggcttgcgctatcatctgcaccccacgcacctgtgcctggaggaatccctggccgccattgccgccatccggcccgggcgcgccgtgctgacccacatgtcccacgacatggattacgggattctttccggcaagctgccggagaacgtcatgcctgcctacgacgggctgaggctgtccctgccgtgattttcacccttcatttccatcaggccatgactgctgcaaacaaccctgaccagcccggcgcgcggatgccgtgcgagaccagaaaggtgttcggcttttccgtggccgtcagctccgtggaggaaatgagctctgccctggcggaacgtgccctggaagcgcaggccccgtgcctggtggccgccgcggacgtgcacgtgataaccctcggcgttcatgaccggggttatggggccgtgctggaacggatggacgtggtttgcccggacggaatgcctgtggtgtggaagctgaacaggggccttcccgcaggggaaaggagcgccgaacgcgtgagcgggccggacctgatggaagccctggtgcgggcgaatgcggagtatccgggtctgcgccattttttgctgggcggagatgaagggacgctggagaccctggcgtccgcattgaaggagaagtacccggcttttcatctggccggcgtgcattccccgccattccgttcctggacggaggaagaccggagggagatgcgggaggcggttgcctcaagcggggccaatgtggtgtgggtgggcctgggctgcccgaagcaggagcggtggatggcggagcagaaggagctgctgcctcccgcggtttatgtgggcgtgggagcggccttcgccttccatgccggaacggtgaagcgcgcgccccggtggatgcagaaaaacggcctggaatggctgtaccgcatttaccgggagccggcgaggctgctcaagcggtacgtgaagcataacagcctgttcgtgtggtatgtgctgacggggaggtaaaaactcttttcccgatgcgggcgccccggacatggggagcaggttattttggccttgtaccgttcccgtgcggatttatcatggcttggccgggttctgcacgcctgcaggggtgcagctggcgttttccatccttccatctcctttaacttcttttcctcatgttctttcgccgcattccccggaaaagctggtatgaaaaagccgtggaacgcgttttcagggacaggaggttgtgtgaggaaaaattgcctcccttcggctgcgttcgcggggaaaatggttttctgtaccggacaaagctgctgaacgggcagctctgtatggaatttgaaatacatgcggagggctccgtcagcgtaacggtgcgtgatgcggacgggaagagtatccctcatcttgctcagggagaggcagacaggttgcgggagagggcgctccgcagggaatatgaggaagagctgtggcatgtggcggagtgctgctttgaacctgatttcttcaagggcgatcctgcccggagcctcgtcgcgcacgtccgggaggcttacggggatgaattggaattcctgtggaggaagtcgccgggaagcgctgtcgtgcggcggaaggacacggaaaaatggtatgccgtttttctggctgtgccgcggttgaaactgggcggcagttccagggaaagggtggaggtgctgaatctgcgggtccgccctggggagctcgagggccttgtggaccatcacagccgttttccggcctaccacatgaataagaaaagctgggtgagcctttgcctggacgggaccgtctcctttgaggagctggccgcgcgcctggagaccagccgccggcttgccgggaagtaaacgccgctgccggcggttttccggagggcttatggtttcctcacccggaatgcggcggcggagtttgcaggtggtaaggcgggacggggctcttgacccggaagggagccgggcctacagtgggggcatgaacgttgaagaaaaggcgctgtccaccttccgcacggaaccctggcgccacaattgcgcccaggccgtttgcgcggccctgggaagggaggatttgctggaagccgtctccgcgtgcggcacgggaagagcgcctgacggggtatgcggcgccttgtatggagcgctcctgtgcacgcccgtgcagtcaagggaggagctgaagcggcggtttgtggagaagctgggttattcccattgcagggagctgaaaaaagaaggctgtgttccgtgccgggactgcgttgcctccgcggcgtttatggcttttgatttgcaggagtgaacgcagaatgacacgactgtattcatagattttcatgaagaaagagtctattggaatgaatccaaatagaacaacgtcatgaaaaaattgatatatgctatagcagcggtagccgttgcagttccggtagtggccctggcgcagagcgcctgcaacagcggttcctgcaccaagggtgacaaggacatggctgaagccaaggaacacatgaaaaagggcgccaaagccgccaaggacgccgcttccgaaaaaatgaaggaaggcaagcaagcggcgaaggacgcctacgaaaagagcaaggaagccgtcaaggatacttaccaggacagcaaggaagccgtggaccatgcggcggacagggctgccgataaggccgaagccattggcgacgctgcgaaaaacggttaactcaaacgattaaaatacaaaccatttatttattatgtgtgactccaaagatcatatgaaccatatgcatgaaggctgtggatgctcgaaagatgccgcttccggcaagatggaagaaggcaagaaggcaatgaaagacgcctacgaaaagagcaaggaaggcgtcaaggatatggcttccggcgtaagtgacaaggccaagtccatgatggacaaggacaaaaacgcttaattccggcggttgaataagccgttttctattctgcatcccgtatgcggcatgatttccccttgtccgggtttccggacgaggggatttttattgggcgggattttccggttgagggcagccctccccggaagcgtccatggcatgcaggctgattttgtgccttttgcacagttccgccacccggtcacgctccagcagaatggttttgcccgcttccagggcgatttgcctgacgccgcattccgcgcacgtctcaatggtgacggggccgatcgtaggaatgtcgaagcgcatgtcatgccccaggcgcgccacttttgccagtgtggcgggtttgccgttgcccagctcgccgctgcggcgtatgcagttgttggtgccttcaatggcttccacggcaactacggtgcctccgtgcacgacgacggactgcccgatgtgaaggcggctgatttccttggccatctgcatgccgaaaacggcgtcctcccattgttcggtcgtgggacgcggtccggcgatgtggcccggctgcggcatgtgctcttccatgtaggtgaaggcggggaggatggtgaagccttctttttccgcctccgtgatgacggcccccagcagggagtccgcgtttttctccggcatgcgcatcagcacggaaagggcgcggaggtccggacggagggagagaatgttcttcgggttgatgcctcccgccatgatgacgttccgcacgccgtgctttttcaggaaggagaacggcttgctgatctggcccacgctgaattcctggtaagcgtcgcacaggggaatgacggcgggattggtctcccccttgaagcccacggccacgatgcgcagctccggcgtccggcggcgcgccccccggacgatgtattccgggtagacgccgtctccggctaccaggcctagtacgggtgggtctgtcgtcatgcggcgtaaagcgtgcgggaacggagcgggttacaggtattccgggcgctggagcagttccgccacgcgcttgagcaggcggccgatgtccgcgccgtccaccacgcggtggtcccccgtagccacgatgttggccttggagatgggaatgaacgcctccacctcgtcgctccagaccggggtcttggtgacggctcccacccccaggatgatggattcgctgggcatgggcatgggggcggcaaaggtgagcccgaagccgccgaagttggtgactgtggcgatgccgcccgtgctgtcttccggggccagcctgcggcggcgcgcctgggcgatcagcctgttgtagtcttccagcagttcttccatcgtccgttcgttcacgcggcgcagcacgggaaccatcactccgtccgccacctgggcggcgatgccgatgtcaatggtcttgggggaaaggatgttttcccccaccaggtagccggcgcattccgggctttccgccagggccagggccagggcgcgggcaaagtacagggtgatgccgggccgcagcggggaatgctgcctgtgcttgatgagggggtccatgaacacggggcgcccggcggaggccagggggcgcgtccagctccggcgcatggcgtccgccacggccagccgcatggaggaggccttgcggtgcggccactggctcacgtattccaggaattcctccaggtcgtcaatggtgacccgtcctccggctccggagccggagatgaaagcgatgtccgaggcgctcatgcccagttcatccatgcgcgccttcatccggggggacatgtagtgcgcgcctttcatgccggcgggcaccggcaggccgcgcacgctgggctggactttcaggtccgtgccgttttcctggtaggattcccccgtcaggccaaagtggaccccggcgggcttttcctcccgggcggaagcgtccgggacgcgctggggcacggattccgggctggccggaagggaaggctgggtggagtcaccggccggggtggccccggaacgctcaatttcctcttccgtggcgtcaatcatggccatgcaggcgccgaccacgatggattccccttccttgataaacacgtcgctcaggacgccgccgcacatggtggtgacgcccatggtggccttgttggtctctacctcaaagatttcttggtcggcttctacggtgtcgcccggggccgccagcaggcgcagcacggtggcttccgcaatggaatccccgagctggggcatcagaatgggtactttaggcatggtggaaactgggttgaatcagatggataaaagatggcggatggaggcggcgatggattccagcgtagggcggtgcgccttccacaggttgggatgctgggggatgggggtgtccctggcgttgagccgctggggcggagcgtccagcagatggaagccttccgccacgatgcgggaaacgacttccgacgtgacgcccccccacgggaagtcttccccgacgaccaggacgcggccagtgcgcgctacggaggcgatgacggtgtccatgtccagcgggcgcaccgtgcggaggtccactacttccacttcataaccgctctccttcgccagcaggtccgccgcgcgcacggcttccggcaccatggcgctgtacgccactacggtggcgtgctttccggtgcgggcgatccgggccatgccgaagggaatcaccggggcttcccggtagttgtcctccgccttcagccagcggtacaggaacttgtgttccaggaagatgacgggatcgggcacttccacggcctggcgcagcatccagtaggcgtccgccacggtggccggggtcatgacgtgcaggcccggatagtgggcgaacagggcttccaggctctggctgtggaagggacccgtgccgggcgttcccccgcagggcagccgcaccgtgatgttggcgggaatgcccgtgcggtagtaatgggtggccgccatgttgacgatctggttgaaagcgatggtgctgaagtcggcaaactggacttccatgatgggcttcttgcccatgacggcggctccggtgaccatgccggccatggcgtcctcactgatgggggcgtcaatcacgcggtccgggaacagctccttgaggcccttggtcgctttgaaagcgccgccgaaaacgcctatgtcctgtccgtacaggaagacgtccttgtcttccgcaagcaggtctttctgggcgtcgtgaatggcatcaatgtatgttacgctcatgggaatattccgtttgcaggcttaataaggtctccacaccgtggcgttccagtcctcccggaaggggtccggctccggttccctctgcgcagtagccacggccagctggacttcatcggcatactgctttttcaggtccgccacttcttccggcgtcagccagccggcttccagcagttgccgttccgcgacggtgacggggtcttttttgtcgtactcatccttcaattccctggggatgtaggaggcgtcgtcatgttccccgtggccgcacatgcgcagggtcttggccagcacccactgggggcccctgccttccctcgcgttgttgacggcggtgcggaaggcttccagcgtagccatgaagtccgtgccgtccgtttcatgcacggtgaagccgtagccgcggcccctgtccgccagggaggcttccccgaattcacggacattgggagtggaataggcgaattgattgttggtcaccacgagcaccagcggcagttgttccacgttcgccatgttggcggcttcgtgaaaggcgcctgtggacgtggtgccgtctccgcagaaggccacgcctacggggccgggaagcttgccgtccagccgcttggcaaaaaggcagccgatgacgaaggccaccgtgctgcccagatggctgatgggcgccatgtagccttccgccggcagtccgcggtggacgttcccgtcccgtcccttcatatagcccagggcagagcccaggtaggagcgggccgcttcaatgatcggttccccccaggtgatgcgcgccgcctgttcccggatgaacggggcgatcacgtcatacccggcggtcaggaaaacgccgccgcaggcggcaatcgcttcatgcccgcggcccaggtaaacgccgcccgtgattttgcccgctttatacaggctggaaattttggtgtcaaaggcccgcgccagcaacatggccttgtaagccttgacggcgctttccttcaagtccggttgtgtagtgtcgcaatgtgccaccccattattttatatgctgcatggggaaatgcaatgccatttcatgaaacttccggagacttcatgcctgcgggcctgaacggacgttccggctgcaccgcagggcggcaggggcgcggacggggaactccggttcccgaaaggcgttttttacatcctcttcacccattgcctgttccggaaaaaatcccccggttcacttcccttccggcggaagggagcatctcagttcgaatttgggatgcaccacatcgtagtctccggaaaacaattccgtttccatgatgattttatcatactcctgcgcaaaaagttcgggaaagaccaggggggccttcccgatatcgctttccttcctgatggagcagaggaaggaggcggcaggcaggcgcacgacttcctttaactgccgggcgtcccttttggtcgcttccacctccacatacaggaacctttccgttccggagctccggtggaaggaaaggagtccggcttccgcgcccagcctcagctcattgcggttaatgtcatcaaacatgttggtgatgagtacattgtaatccgtgctgtgctgttttccggcatagggggccgtccagcaatatttttccggcagggcgtggacggtctgcccctcatggcgccggaggccttccatccggtccatctgcttctggaatttttccagcaggtgcagtttctcctgaatgtccctgattttctggtgcgccagcatggtgccgtgggaaatcagcttcttgtaatggattctctgctggtcctcggtcagaaaggaggtgaactccttcaggggaatgtccaggaaggtgcaggcgcggatggcgtccaccacgggaatctgggagagggtgtaataacggtagcctgtatccgggtccgtatgggccgggcgcagaatccccagttgctcgtaataccggagtgatttaatatgtacgccggtctgtttggacagattgcctatggttagtaaattctgcttgtccatcctgtattgcggttggcgtggaaactgattttttcccgccggaggcgcgcccggcggaaacggctgctgcatgcaagagaaatcttcctgaagacgaaatcgtcgcgtcattcatttgattcttgttgccagcagcttacaacaaatgataaaaagccgctccacttaatcttttcattgcctcttgactctcccattatgggatactttacatcttatggcaattgaaaaatccccggtcttgtcggaagcgtggttccggggtttcttgaggtcttataaagcatgattactgatgaaaacaactagtctccttcttctctgcaccacccttttggcagctctctcctcctgccggcagggggatgaaaatccggccgccggttctcccggagaaatagtgccggaagtggccgttctcacggtgcacggcacccaggttcccgtaaccgccaaccttcccggccgcatggaggcgtacctccaggcggaagtgcgcgcccgcgtgacgggaattattcaggaacgctgctaccaggaagggcagacggttcgcccgggcgaccttctcttcaagatagatccggctccgctccaggccgtgctggacgaatgcaaggctacggtagcgcgcgccaaggccgtgctggcggatgcggaggacaaggccgcccgctattcctccctggtggccaagggcgccgtcagcgtgcgggagcacaagcaggccatggcggaggaagaccgggccagggcggaatatgccgccgccgccgcgtctctggagcaggcccgcctgaatctggaatacaccagggtggaagcgcccatctccggccgcgtgcgccgcgcgctggtgacggaaggggcatttgccaaccagaacgaattcacgcacctgaccaccattgagcagatagaccccatctatgtccgcttctgccagccggcctcccagtacagcagcctgcgccgcgccgtggtgtccggcctgtggaagggagtgccgctgggtgaaatcaaggtgcgcctgctgctctccaatggggaggaatacccccattccggcaagatcatcttttccgacatggcggtggatccgaatacggacaccattgaaatgcgggcccagttccccaatccggattatgagcttttgcccggcgcctatgtgcgcgtggtatttgagaaggcggtgcgggacaacgtgttcgccattccccgggacgccgtcatccgcaccgcgcagggggcttccgtctttgtcgtgggcccggaaggcgtgctggaaatgcgccccgtgaaggcggatacgctgaacggccgggaatggctggtttcggaaggcctcaaggacggggacaaggtggccgtcagccacatcatgtccctccggcccggcatgaaggtccgcagcgccgcgccccagccgcaatccaacgcccagcaataacccgttatgcctgatttctttatacgccgccccatttttgcctgggtagtcgccctgctgatttccctgatcgggctgctggccattcccagcctgcctattgcccagtacccggacatcgctccgccggtcattaccctgcgcactacgtatccgggcgcctccgcccaggatacggaggaagccgtcaccgccgtgattgaaaaggaaatcaacggagctcccggcctgatgtacatgtccgccaccagcagttccgacggcgcggtggaaatcgccgccacgttcacgcagggcacggacccggacattgccgccgtggaagtgcagaacaggctgaaaatcgtggaatcccgcctgccggaatctgtccggaaggaaggagtgttcgtggaaaaatcctccaacaacattcaggcgatgatctccctttcctccacggggaacctgaatgatacggaactgggggaatgggcttccgcgcgcatcatccctgaattgaagcgcgtgaaaggcgtcgggcgcgtggagctcttcggcgcggaaacgtccatgcgcatctggcccgatccggaaaagctggaagcgctggggctgacgcccacggacatcgtgaatgccgtggccgcccagagcgagcgcatcatcatcggtgacatcgggggggcggccgtttccaaatccgcccccatcaacgccagcgtggtggcggaggaagccttccgcacgccggaggaattcgcctccattgcgctgagaacgctttcagacggttcctccgtcaagctgggggacgtggcgcgggtggagctgggctccaacagctacgcgttcttctcccgctgcaacgggcagaccgccaccggcatggctatcaagatggctcccggctccaacgccgtggaaaccatgggcctgctcaaggccaagatggatgagctggccagggacttcccgcccggcgtcacctaccagattccgtatgaaaccacccatttcgtggaaatctccatccagaaggtcatctccaccctgctggaagccattctgctggtattcctggtcatgttcctgttcctgcagaacttccgggccaccctgattcccacgctcgtcgtccccgtggccctgctgggcacctttgcggtgatgtggctctccgggttctccatcaacatgctcaccatgttcgccatggtgctcagcatcggcattctggtggacgacgccattgtggtggtggaaaatgtggaacgcatcatgatggaggaggggctggacgcccggcgcgctacggtaaaagccatgaagcagatcggaggcgccatcgtgggcatcaccgccgtgctcgtggccgtgttcgtgcccatggcctttttcagcggagcggtggggaacatctaccggcaatttgccgtgaccctcattgtatccatctccttctccgcgtttctggccctttccctgactccggctctgtgcgccgccatgcttaaagcctcctccgtggagcatcaggaaaagaaaggattcttcggatggttcaacaggaccatccaccggtccacggaccggtacggcaatgccgtatccggaatcatccgccgccccgtacgctccctgttcctgtatgtgctcatcattgcgggggccggctacctgtacctcacgcttcccacctccttccttccggaagaagaccagggcaacttcatggcgatggttgccctgcctgccgggaccttgcaggaggaaaccagcacccggctgcgggaggtggaggattacctgatgcagcatgaaccggtggaatacgcctactccgtgggcggcttcagcttcatgggcaccggcaccaacatggcgatgctgtttgtcggcctgaaaaactgggacgagcgttccggagaggacaactccgcccaggcgatcattgaccgggtcaacgcccgttttggcggggaccgccagatgatggtcatggccctgaacatgccgtccctgccggaactgggcagcacgtccggcttcgacttccggctccaggacaagggcggcctggggtatgcccgcatggtggaagcccgggacgaactcctggcccgcgccaatgcggaccccaacctgacgggcgtctacttctccggacaggcggacacgccgcggctgcacgtctccattgaccgggaaaaagccttctccatgggagtgcccattacggaaatcagcaattcgctggcggtcatgttcgggtccagctatgtgggggacttcatgcatgacagccaggtgcgccgcatcattgtgcaggcggacggaaaaagccgcctgaacggcaatgacattgaagacctgcatgtccgtaatgaccaggggaagcttctgcccctctcctccttcgtccggctggactggacggccggccccccgcagctcacgcgctacaacaactacccctccttcaccatcaacggctcctccgcgcccggcaagagcagcggggacgccatgaacgccctggagcagattaccgccaccctgccgcagggcgtgggatttgaatggacgggacagtcctatgaagaaaagcttgccgggtcccaggccacgctgctcttcggcctgtccatcctgatcgtcttcctggtgctggcggccctgtatgaaagctggtccattccgctggcggtcatcctggtggtgcccctgggcctgctcggagccctgctggccgtcttcctgcgcgacatgcccaacgacatctacttcaaggtgggcctgattacgaccatcggcctttccgccaagaatgccatcctgattgtggaagtggccaaggaattctaccgggaaggcatggatgtgatggaagctgccgttgccgccgccaaactgcgcctgaggcccatcctgatgacctccctggcgttcggcgccggggtggttccgctggccttcgcccacggggcggcggcgggcgcgcagcgcgccgtaggcacgggggtgctgggcggcatcattacggccaccctgctggcgatcttcctggttcccctcttcttccgcctgacagccggaaagaggaaacaggaacacccggaagaagcatagggcacgaggctggaacggaaacgcctggaatagcccctgccgcggaaggcgcgggaagacagaaccctgcatgggaccgctgcccgcgcctgatgcgttaaaaaaggggagcacgtttccgtgctccccgtctttcgggaaaaaggctgaaagaggttttcctgcggagggagggcctgaaaagcctcgttatccgcatgggctggaaccccgtatgccgctgcgcccgtgcttgggattattccctgccgcgcgcgttcaggaaaatgaacacgtaatacagcagcatggccagggaggaaagcgcgcccaccacataggtcatggccgcccagaacagggcactcttggcctttccgtggtcgaagtaattcatcaggtgggaacggtccagccatttcagggctctggaggaagcgtcaaactccaccggaagcgtgatgaaggcgaagatggtggtcatggcaaacaggccgatgcccagccccagcacccacggggaaccgcccatggccagcaggataatgccgatgatcagcacgatgctcaccagattggaggagaactggacgatgggaaccagcgcggaccgcaggcccagccagtgataggcctgggcgtgctgtacggcatgccccacttcatgggccgccacggccgcggcggcaatgctgttggaattgtaaacggactcgctcaggttgacggtcttgtccgccggattgtaatggtccgtcaggtggccgggggtggaaatcaccttcacgtccgtgatgtggttgtccttcagcatctgttccgccacttcccgcccggtcaccggaatgggaatctgggaatattcgctgaaacggctcttcatgcgcgcgctgaccagccagctcagaagcatggagcccagcagaatcatccagtaaatggtataggaatgctgcggggcggtttccgccgcctgggccgtgtaggaaaggaagtcgatattgaataattcaatcattgcaagtttgaccttatatcataaggctttgttgaatccagagggcgccgtgtcagccgccgggagaggttcccccggcttctgtcatacggaaacatgcggaagaacggtgcattcaatcgtccgccttctgggaaagaagtttgccgtccggggcatagtaaagctccagtttgcggacggcggcggtttctgaccggcagtccacccggtacttcagggctcccctggcggtgatctgcttggcgcggcggggagcgtaccccgggaaatcgcgggcgatggccgccgtaacgggggcgggcagatcctgaaggcgcatgtccgccttaatcaggcagacggtgccgtccggataaagcttgacgtcgtattccaggccgttgaggtggaattccgcctcgtaaacgtcttcgtcgttgtcgaaatcccattcgatggcgccggcgttcggatactgcttctgcacctgttccttcacgggggcaggaactcgggaggccggaatatccgccaaagccggaagggtgaatgcggcagcgagagtggtcgtaagtatacgtgaaatattcataaatacgtgataattgtatttattcaaaaaacaagaatcttttgtgaatgtcttgtgacaattctgccatcaatggaatgaatccgggcatggcggggtttattgtcgccaaaaagcgggtgatggagttgaatgacagcatgcaacagggtattgtttatttgcttggagcgggtccgggggatcccggcctgatgaccgtccgcgggcgggaactggtggaagcggcggaagtgctggtatatgatgcgctgagctcggcggaactgctgaactgggctcctgccgcatgtgaaaggatttttgtgggcaagcgggcttcccgccacgccctgccgcaggaggaaatcaatgccctgctggtcaaactgggacgcgccgggaaaaaagtggtgcgcctgaaaggcggcgatccctacgtcttcgggcgcgggggggaggaagcggacgccctgcatgaagcgggcgtgccgtttgaagtcattccgggcattacctccgccattgcggggccggcctatgcgggcattccggtgacgcaccgcaagtactgcacgcaatttaccgtcttcacgggccatgaagacgtgaacaagaaggaatcttccctggacctgaaaggaatcgccggagcgcagggcacgaaaatcatgctgatgggcatgcagaagctcgcggacgtctgcgaagccctgaccggatacgggcaggagccgtccacgccggccgccgccatccagtgggccaccacgggcattcagcgcacggttacgggcactgtccggacgctgcccgccaaggttcaaaaggccgggctgggcgcccctgcggtagtcgtgatcggggatgtggtgaaggaacgcgacagcctggcctggtttgaaaaactgcccctgttcggcaagcgcatcgtggtgacgcgcacccgcgcccaggccggggaactgagcgtgcgcctgcgccgtctgggtgcggaagtgctggaaatgcccactatccgcatggcccccccctccaacaagcgggaatttgcggaaggcgtggtgcacgcccatacctatgactggctggtgttctccagccccaacggggtggaacgcttcttccaggcgttttttgccgtgtaccaggacatccggagcatcggaggcgccaggattgcggccatcgggcccggaacggaggcgaagctccgggaatacgggctggccgtggatatcatgcctaaaaaattcgtggcggaaggactcgtcaaggccttcaaggacgcccgcgaggaaatcggaaccattgagcacagcacgttcctgtgggtgcgcggggaggaagcgcggcgcgtgatttacgacggcctgaccgctctgggagctattgtggacgaatgcatcgcctacaggacggaagcggaaacggaggacgtggcgggagcccaggcggctttccgggagcggggggcggatatcgtgacgttcaccagctcctccacggcggaaaactttttcaagctggggcttccgtggccggacggctgcaaggccgccagcatcgggcccgtgaccacggcaaccctcaaggagctggggcgcgcaccctcgattaccgcgaaaacgcacgacatcaacggcctggtggaggccatcgtcaaggccgccggcaaataggaaaaacggtgcgccccgcgggagatgccggggcggaacggatggaaaagcgttatccggggaaatgccgtttaaaagccattgacggcttcccagccgatgacctttccattttcaaacaggacattataggaaacgggcggacggctgcccaggggcatcgtgacgcctatcccggtgcctaccccggaatccctgctgcggaatccgcctccgcccaggcccacggaccagcccgtgccgctccgcgtgtaaatccaccgttccgtattcttcccgttcatccggcctgccatcttctgttcaggttccccccatgccagcaggaccgccatgggggacatgcccttttccagctctccgcgcgccactttggcctgctgctccttcggaagctgttcataggcctgcatattcttcgcgatgcggtcggacggcgtgggggaacaggcccccagcagcgcgaggcaggcgggaagcaggacgaaaggaaggctcgttttcatcatcccacaaatagcatggcgtaagatggctggcaaggtgccagcgcggcttttccggaaaatggaggcgggaaaatccgttattctgacataaaagctcgcttttcccgtaaatacataattggttattgacaagcatggggggtaggggagtaggaattcacctccaaatgcaacgcgccgcagatgcgggaaaggttgccgccactgtttaccacttctatttttccgagccgccgatatgtccaaaacgttaattatagcagaaaagccgagcgtcgccactgatctggcgagagtcctcggcaaggagcttgggaaattcacccgggacaaatccggcgcgttttaccagaatgaccgggccatcatcacgtccgccgtgggccacctgctggaacagaagaagcccatgacggagggcggcaagtccctgccatggaagttcgactatctgcccgtcatccccaggacgtttgaactggaacccatcaaacagtcggaagaccgcctgaaaaaggttctccagctcgccaaaagcaaggacgtgacggaaatcgtcaacgcatgcgatgccgggcgcgaaggggagctcattttccacaacctggtgcgttacggaaaatggaccaagcctgcgcgccgcctgtggatgcagtccatgacggatgaagccatcctgaatgcgtggcacagcatgcggagcgaggccgacatgcagcccctgacgaacgccgccgtgtgccgttccgaatcagactggctggtgggcctgaacagcacccgcgcccttaccatcctgcaatcccgcggaggcttcaacgtcacccccgccggacgcgtgcagacccccacgctggccattctgacgcagagggaactggaaatccaggcgtttgaaccggtgccctattcggaagtgtgggcggaattcggcgtgcagtccggctcctactccggccgctggattgaccgggactggaaaaaggacgacaacccgcagtcccgcgcggaacgcatctgggacccggaacaggcgaccgtcatccgcgaccgctgccgcggcaaatccggcacggtgacggaggaaaagaaacccgtcacaaccatcgccccgctgttgtatgacctgacctccctccagagggaagccgccaaccgctacggcttttccgccaagcgcacgctgcagctggcccaggagtgctatgaaaagcacaaggtgctcacctatccccgtacggactcccgctacctgccggaggactatctgggcaaggtctacggcatcgtgggcacggtggcggagcaggacccggaattcgccacttttgcgaaggacatcctggacaacaagcgcatcaagcccaaccggcgcgtgtttgacacgaaaaaggtaagcgaccacttcgccatcatcccgaccggcaagatggaaaagcttaccggagacgcgcagaaactctttgaaatggtcatggcccgcttcctggccgtctttttcccccccgccgtgtttgaggacacgcgcagaaccacgctcattgcccaccagggcggcgtgacggacgccttcctaaccacggggcgcgtgctggtggaaccgggctggcaggccgtctacggacgcaaggcgggcagttcttccaaggaagagctggtgcccgtccatgacggggaacaggctgccgtgcgtgaaattgaaatccgcaacgccatgaccaagccgcccgcacggtacaatgaagccacgctgctggccgccatggaaggcgccggaaagctggtgcatgacgaagaactggccgccgccatgagcgaacgcggcctgggcactcccgccacccgcgcctccatcattgaaggcctgatttcccaggaatacattgtccgggacggccgcgagcttctggcgacgcgccgcgggattgaactgatcgccctgctggaacgcatcgggctgaaaacgcttacctcccccagcctcaccggggaatgggaatacaagctcaagcagatggagcaggccgccctgccgagggactccttcatggaaggcatcaagactctgaccggggaaatcgtaaagagagtgaaagacttccgggaagcccagcagcaggtggaactgccggaaatggaactggactgcccgtcctgccatgcccacggcctgaaaaacacgctggacgccgtttcctgccgttcctgcaagttcagcatccgcaaggtcatctccggccgcgacatgacggatgaagagctgaaaaccctcattgtggacggcaagacgggaatcctccacggattcacctcccggttcggcaaaccctttgaagcggggctggagctcaacgacaagttccgcgccacgctctacttcccggcacgggaggaggacgaagccgccgggacggaggaagccgtgaaagtggcctccgtcaccatcccggacatgggggaacacgatgtgatggaaacggccaaggcctggaaagtcccttccctggccattggaaaggaaaatgccgccgtctccgtttcccggaccatcctgggccgtgaaattccgctggaccaggtgttgaagattctggcggaaggaaagtccgacctgatgaagggcttcatctcccagcgcaccaagcgcccgtttgacgcttatctggtcttcaatgcgaagacgggcaagatcggctttgaattcccgccccgggaaaagaaatatccggctaaaaaagctgcggccaagtcggaagacaaggaaaaagcttcggcttccaaaacggccaggacgcccaaaactgccgggaaaggcgcgggaagaagcgctaaaacggcagaggcggctcctaaaaaagggaagaagcaataactgcggtccgaggattttctccggatgcgcggtcagggtggcatgaggccgctgattggagggaatgatgaggggcgggagctcctcactcccgggcaagccaaattcagtttcccttgcttcttccaattccccccggtttgtcacggtctcccgcccgggaaaaagggccttccggcccttatcggccctgcatggcctccggatgacatgtgatgaggccgttttcccctttcttgttccgggttcccgatgcagcggcggtcaattaaaagcttttatccggccggccctgttgttagggttgcagttgcaaccctgtgttcctgacgatgaaactccttctgcttgctgtgctggtatggtgcggcgcggtttgtgcgccggctgatgaatatgcctttccgggcgaacgggaatggatatccaagctcggagatgtggtaaaaggcagttttcaatcctgcacgggttccagattggcgcttaaaacggggcggaaacgtgtggaaattccgctgaaccgcctggatgaggaagacgcggcgctggcggcttccctaacgggcacggcggcgcgccgggacctgaagctggccgcgatgctctggccgttcctgatgaaggaactggaaaaagcaacgtggacgccggtggaaaaagacatcactccccgctataatgaagcggcccggaaaaaccccaccagaaccttgacgggaaccaggaaggtggacgggctggtctgtaccacctccctttccgccatcaagggccctccgttccgaatccaggaatactgccgcccgcaggcgcgcccggaaagcgggagggggcagaaaaactttgacatggttctggaccagggaagcctttacgcctattacgataccggaaaaggcctgctcattccctccaaatacatgcctgaggaacggacggaaatgcgcgctcccgtttcctccctgctccctccgggcgaacgactcgccgcaagggagacaaaatcctacagcaatgcggactactccctgtccatggaaagccgccccgtcaagggagcctatgaaacgtgcaagcccaattccctgggaaaaaagaagctggtgatgtactggaatacggagggcaaaatggtctgcggcatcatgaagctggactacgacaacatgcgcgttgccgccctgtttgacgaccagcggaagctgatgaacgctccgggactggggtatgccgtgattctttcccgcctggacaaaaaaggccgggactccagggaggacggccgttactaccatgtggcgctggccgcggacgggctgcccgtgtaccaccatgaaggcccggaggacgaggccgccatgaacccgctgctttacgggaaactccgtgattccgaaaagaaagcggcgctggcggaggaaagaaaacgcgaacaggcattccgtgccaggcaggaagctcgccaacgcctggtggaatccgccaggaagcgaagagaatagtccgtccttgaatcttttctggaaagattactcctcggaaagatggtccgggtgaatggagtagtgcccgggggcgtccagcgtgtcaataagggccatgtcttctccgtccagggagaagccgaaaacgtccaggttggctttgattctgtccgcatgcacggatttggggaggggcacgatgccgcgctggagttcccagcggaggcatatctgggctacggattttttatgcttgtccgcgatgcggcgcaggacgggttcctccagtacgcctccgcgggccagggggccccatgattccaccagaatgccgtgttcccggcagaaggcgaccgcttccgtctggtggtacctgggattgatttccagctggttcaccatggggatggtatcggcttgttccatcagggcttccaaatggcggggaaggaagttgctgacgccgatggcccttgcctggccctccttgtaaaggcgctccatggctttccaggtttccctgttcagatctctgtagtccttctcatatccggcggggatgggccagtggatcaggtacaggtccagataatccgtttcgaggcggttcagggaggcgtcaaaagcgctcagggtgctttcataaccctggtccgtgttccagactttgctggtgatgaagatttcctcccgcggaatggagctttccctgacggcgcgccccaccgttttttcattgccgtatacgctggctgtgtcaatgaggcggtagcctgcttccagcgcgtcaagaatgctccgggttcccgacgtgtcgtccggggccaggtaggttccgtaaccgatgccgggaatggggaggccgttgctcagccgctgcgtatctccgggggaagtgatgattttcatactcttcatgaagcaccctccgccggaaacggtaaagagaacgccttgtcatgagtgcggcatgcgcggcagaaagggggagggattatttcccggcctggaggcagcggtagtaatagtccacgcgggagatgaaccagctccatttatagccggggcggccgttggtcatcagcggggcggggcagttcttgccggaccagtagttgtggggcaccacgttgcgcagggggacgttgtagcgcatcatcagcagggccgccagcttggctgtcttgttgtagatgacgacggggttgtgcgtggtgcattcgcacatttcaatggctacggagtattggtcgcccgggccggagtggtccgcgtggtggcccgtttccgtcgtgggaatgtgctggtacgcgccgaactggtccaccgtgaagtgccagttcaggctgcgggatttgccgctgttcaggtagcgggaatgggcgttggcgtctcccttggggttggcggtgctgtggatggtgatgaagcgggggcgcatggaggccgcatgcctgcgggcatacgtgcttttgggcatgtaggagacgcggatgcccacctcacggcccatctggttggacgtgcgggggactaccggggctttttgaattttgaaggagacggccggcggtctcattttatcgttctgcgagcagctgcagaacgccagggcggcgaatacggcaagaaagcccgtccagacagatctatattccatgtgtttgttctagaaacagcccggaaggattgcaagcagaatttggaattagttcaagtgaactaatcaagccgtgtcatggagctgcgggtgctcccggagaggaaggcgccagacgggccgcgccttcgggggaagggcggcccgtctggaaaggatgcggcgccggaaaagcccggccaagccgcgttatttgaggatttgagtgaggacgtattgcaggatgccgcccgccaggtagtattccttttcaatgggcgtatcaatgcggacgatgacgggcacgtcaaacgcctccgcgtctgcgggctgcacgcgtagcgtgacctgctggcgcggggcgatgccgttgtccagccccaggatggagaaggtggcgtccttcaacggggcgatgcggtcgtagtccgccttgtcggcgaagttgaggggcagcacgcccatgccgatgaggttggaacggtggatgcgttcaaagctcttggtgatgacggccttgacgcccagcaggttcgtgcccttggccgcccagtcgcgggaggagcccatgccgtagtcttctccgccgatgacgatgagcggaacaccgtcctgcgcgtaggccatggctgcatcatagatgaaggcgggggttccggcggcaggggttattttcttgtccggggcgggaatggagcggttgccgaagtacagcgtatagccgccttccgtgccgtccaccatcaggtttttgatgcggacgttggcgaaggtgccgcgggtcatcacgcggtcgttgccgcggcgggagccgaaggagttgaagtcttttctgtccacccccatgccttgcaggtacagcccggcggggcccgtttcccggatggctccggcgggggagatgtggtccgtagtcacggagtcgccaaagatgcccagggggcgggcgtcccggatgtccgccagcgtgcggggctggccgttgaagccgcagaagaagggcgggtcctggatgtaggtggagttttcattccactggaagacggagccctccggcgcatacacggcggcccagcgtggatttttgtccggcgtgatggtgtatagttcccggtacgcttccggattgcgggatttggcgacggcttccgcgatttccccggagctgggccagaggtctttcaggaagacgggcttcccgctgcggtccgtgcccagcggttccgtctggaagtcgatgtccacgcgtccggccagcgcgaaggcgacgaccagcggaggggacatcaggaagttggttttgatggaaggatggatgcgcgcttcaaagttgcggttgccggagaggacggaggcggccacgatgtcattgttcctgaccgcctgttccagttccggattcagcggtccggagttgccgatgcaggtggtgcagccgtagccgacggtttcaaagcccagggcgtccagggattcctggagctggttggccgcaaagtagtctgaagcgatgcgggagcccggcgcaatggacgtttttacgtgcggcggcacttgcaggcccagcgcgaccgcttttttggcgagcagcccggcggcgagcatcaggcccggattggaggtgttggtgcaggaggtgatggcggcgatgaggatgctgccgtctttcaattccgcctcctggctgaagccttccaccggaacgggaacgccagccggagagtgcatggtgaccttgaccgccggggattcctttttgccgtaaccgccttccgccgcgggcatgccggcgagcttgcggaagctgtccttgatggaggccaggcggatgtggtcctgcgggcgcctgggtccggaaacggcgggttccacggtggacaagtccagttccagctgaaccgtgtagtccagttctccattgcggggcattccccacaggtcctgggccttgaagtagttttcgtacgtggcgatggcttcctcgctcctgcctgtctggcgcaggtagtcggagcagcgttcgtccatggggaagaagcccatggtggcgccgtattccggggccatgttcgctacggtggcgcggtccgccagcgggagggccgccgctccttccccgaagaattccacaaatttgcctaccacgccgtggctgcgcagcatctgggtgacatggagcgccaggtccgtggcggtcactccttcacggagttcccccgtcatgtggacgcccactacttccggcaccaggaaggtgaccggctggccgagcatgccggcttccgcttcaatgccgcccacgccccagcccacgacgccgatgccgttgatcatcgtggtgtgggaatccgtccctaccagggtgtccgggaaataaacgccgtccttttccatgacgccctgcgccaggtattccagattcacctggtggacaatgcccacggaagggggcactacggaaaaggtctggaaagcctgctggccccatttgaggaattcgtagcgttccgcattgcgctggaactcgatgtccaggttcttttccagggcgtccgtgcggcctgcccagtctacctggacggagtggtccaccaccaggtccacgggaaccagcggttcaatgacggaagcgtcttttcccagtccggccacggcggagcgcatggcggccaggtccaccagcagcggaacgcccgtcaggtcctggaggacgatgcgggccaccgtaaacgggatttcataggaaccgggatttttggcgttccaggaggccaggttgtccacatccttttccgttaccttcaggccgtcgcaattgcggagcagggattccagaacgatccggatggaaacgggaagacggttcaggcggggatagccgttttccgacagggctggcagtgaataaaactgtcccggggttccggttcccgtggtgaacgtgctcttggcaatcttggtcatgatgcggaatagagggttaactgtaaacaggcggctgccctcctggcagtcgcgggtactatacaggccaaatatgataaggcaaggactctgtgtgacggggggaggatttttccccctctcccgcaagcgtggaaattcctttttgcacgcgtgctgccggttttttccggcgtttttgcctgtaagacgcgcaggaactgacaacagaaccaggaaaaacttgtagaagcacggcattttgtttagatggcaaggatttgcgtctggcatcctgctgtgcgcaccccaataaaaatcaaactggattaaagaatatgtctgagttagaaagaccaaacaatacgcttgccatttgtgccctcgtctttgccgttttatgcagcctcgtaggcctcattctgggcatcataggcctcaacaaatatcccgacaagagcaacggcaagacgatgagccttattgccgtgattctcagcatcgtcctgatgctggtcggcggctggactgcctggcgcaactgataaaaggcttcaccaggctcgtgaatccaaggcttgcggagaaccgaagatccgcaggcctttttcatggaatgaaactgtttttcctgtatctggcgctgctggctgcggcatgcgcggtgctcctgctggtggatgacccttcccggtccggctggctgccggagtgccttttctataaaaccacgggttatctttgctacggctgcggttccaccagggccctgcatgccctgcttcatggccattggcttgattccctgcggtacaacgtgctgctggttcccacgctcatctggctgggaacgctgtttttcatcagggacaagaccgtattcctgagggtgctgaccgccggcgtggccgtacttgccctgtttaccgtggcgcgcaatattccgctgtcgtgacggccgcttttttccggtttccgccttttgcgtgcatgccggaattttgatagagtgcgtcatgaaacattgaaaataagttcgcggcattgtccaaccctctgaaagggttaaagatgatgaacgcgaaaaaaaccttatcaattattgcaggagcggcagcgggagcgctggtgctggcagcctgttcagggccgcaggaagagaatttgcgcatggtgcccctgacggtgcctacgaccatgcccatgacttcttacgggccgaatacgagagtggtggtggccggggtggattatacggaggtgcatgacgagtggatgaaccaggacattatgaaaaaagccactcccggcaatacgcgggtggtgatcagccgcggaagccagaggggccagctgatggtgggggatgaagtagccatggattttcccgtctgtctggggaccgcttcccaccgcacgcccgtgggccatttccgcattacggaaaaggcggtgcaccacgtctccaatttatatgatgcctccatgccctatttcatgcggctgacggacagcggcatcggcatgcacgtgggacccgttttccagacgccccagtcacatggatgcatccgcatgacccgctcctcctgtgtgccgcttttcaagaccgttaaagtaggtactcccgtcacgatcgtgcagtgacgcggaggagaaggcggataccgttggcggagaagagctccttgcctccctcttgtggcaggtgaggggaatccggcgctggcagaaaatggtttttatttttatgatatgttcatggtcaaagaatcgggacgatttcaatagatggatgaaagcgttgaaaataaaaaactcatttttttaacacaaaacgcgcctggccgtcgctatttcaatgaacggcatgaagataaacggcatttgctgcaagtcgtattgccccaacaacccaaatcctccatggcctgctgccgattgcccactctccattcatcggcagcggcatggatggagggcgtttttttcaaacgcaggcgtaccggaattggttgactgcctgcggcccgggaagcagccttcatgaatcttcttccggagtactacttttatccctttccggaacctcttatgcatgggacgccgcattcagcatctttgtttcctgtctcccgtcttacagcataagtgcgcatggaatcttgcatggaaccgagagccggttctttatccggccacacttcgtcctccggatttttaacggattgatggataggtgaggttcaccttccgttttttccataagctacttttccccggattttctgtccgctgcctcccggcgaagctggggcaggtattttccatacccctgcgcttccatatcctgttcaggaatgaatttcagggaagcgctgttgatgcagtagcgcaggccgccgcggtccttcgggccgtccgtgaagacgtgccccagatgggcgtcccccgttttgctgcggacttccgtacggcgcatgccgtgggaaagatcctgtttttcctgaatcagttcttccttgatgggccgggagaagctgggccagccgcagccggaatcaaacttgtccgtggaaagaaacaggggttcccccgtcgtaacgtccacataaatgccgggcttgtcgttattgaaatattcgttgcggaagggaggttccgtcgcattgttccgcgtaactgcaaattgctcgggcgtcaggctgcggcgcagctcgtcatccggttttttccggtagacgggagcggcttccctggcctgggccgcctcctggaacttgccgggcggaatatggcagtagccgccggggttgttgtccagatagcgctggtggtatttttccgcccgtgaaaattgacgcaggggttgaacttcaatcgccacgggctgcttgaagtgctgctggagccgtttcagggaggcttctataatcggcttgtccttctcatccgtataataaatgcccgtgcggtattgaactcccctgtcgtttccctgcttgttgacggaaacgggatcaatgatggaatagtattgttccagcaggaacgggaggctgagttcttccggatcaaataccacttttaccgtttccgcgtggcccgtgcgtccgctgcagacttcctcatacgtgggggaggcagtggaaccgttggcataccccacttccgtttccttgactccgtgaatcagggagaagtacttttccactccccagaaacagcctcctgccagataaatcgtttttaaatccttgttgtccatatgatgtctgtttttgttgcctgcctgtccgttttctccgcaggagaacagggaaagcatggctactgcggccagaatggcgcatgccagtccggccagggtccatggtccgtggtaaatacgtttcataaacgctgtatggggtcgtcttccggtgcgggtgcagttgctcccttggctgaagaacctgccgttccacagcttttccgggaagatgaaggattagacaacgccgagcctgttccgttcgatgcctgtgtcaacgtccccccgattcctccggctcttccggttgcatcatgtttttcagccactggtaaaccgcccggtcggcagcgtccggttttctgctcgtctgcatgctgaacccgtacctggtgtggaaattgaaaaccgccagggaagggctcaggccgatggagagcccgtccatccgtatttccacttcctgcgggtcatgggtggtgaagtcaaggcgcccggcattgctgacggaccccgcataatgttccaggaagggctggatgccggccaggaaggaggagtccagggccatgggatgattttccggggaagaagctttcctgataagaattgcgggaggcgctgtggcggaatgagcggctctcagcgtattcagcggaacgttccacaaaaaggagaacagtcccgtgcccaggagaaagaggggaacggccaggacggcaatccatttgcccggcttgtttcctgattgatgacgggaccgtcttccgttcatgaaggataacatggcataatgttccgtgggggtccatgaaagaattggaccgtggagcagaggaaaaatcccgtccttgcatcaggggattttgcgccatcacagggataacatgaaaaacgcacgctggaaatcatgtatagtatcatcagggcccagtactatttatgaaaagagagctgattttatctccgttttttttatttttcatttttttaatgtttgccgcgaatttgtcccttgcggaaaaatatccttcactggacgttccggaggacatcccgcttcaagtaagggaggcttcttcccttcagtccccctactcaggaggccattccgtaaagcaggctgtggacggttctctggaatccgccaactggcatgttcccggagcgcggcatgtggagggggaatttgtatttgaagtgccggacaccattcattacatcaccttttccggagccaatttcagtgaagtttccgtgtccgccatgtccggctcgtcgtggaagaaccttggaaagtttgatataggcggctccaaaatgatcaggtttaaaaaccctcttcagaaagttcagaaaatcaaagtggaggttgattaccctgaaggagcttccccggcgtttaccgtacgggagatcagtttttacaaaaaggcggaatccacgctcaaccggcaattgctgaaagtgttcagagacacgagctgttcctccatcaatcccaggtgcactctggcagacctcaaggcgctgccggagtttttgcagctcattgcgcggaaagtgaaatccggcgcctatgaagacaaggaattccgcattgcgtcctacaaggcttacagccatccggagtttgccgccaaggtgagaaatatcaacgccctgaacaaatttgacaatcccaccggaattgctgcggagaaaggagatgaaatccttgtattcgtgggtcccacccatggagaggatattgcgctggcttccgtttccccggcgggaatcgaatcttccacctatcccctgaatgaaggagtaaacaaaatcaaaatcaaccgttcgggattgctttatgtgatgtaccacaccgatatcagcacgcccaagaagcctgtgaaggtgcacatccccgtgggcagcgggacggtgaacggatattttgacgtgacgaggcacacggacaaggactggaagcggatgatcggcaaggccccccacagcatgttcgacatcgtggggcggtattccatgatgatccttcacacggaatatctgaaggcttacagcccggattccatcacgaaatccgtcagggtgtgggatgagagcgtcagggccatgtggaaaatcatgggctttgacaaatatccccagccgcataacaaccggcagcttggagtttccgtagaaggcggagcccatatgttcgccacctggtattactgcggctacagcgtcggggatcagggaaatacgctgaaaaatgaagtgctcgcccccggcgttcttcaggggaaccgcctctggggattcgggcatgaagtcggccactgctaccagcatccgttcaactggcgcagcatgtctgaaagctccaataacttcttcgcccagttgatcctggaccaggtgaccaaccccattaacggcaatgaactggcctccgacatggaaaacccgtgcaagtacctgctgtcagaggcggtaaagggcctgccgttccatgatctgaacggctgggccaagtggggttttgcccaatattccttctacctgtatttccataagctgggcatcaacccggaattttatcctgcgctgtttgaatcattgcgccgcaagccgctttccaggcaggcgtatgaggtttccgaggctcatctggccctgtatgaacgcatctgcaatgtcagcaggacggactttactgatgactttgaaattttcaattggttcgtcccgattgaccacaaagggaaccagtatggggattacagcttcaagatgacggaggaaatggcccgcgcctccaaggcccggatcgccgccaggcggtaccccaagccgaaattccgcatcgctttcctgcaccagcatgggaaaacggtcgatttgtggggacagaacctgcatggttcccagctcaacgggtattggaccaaatacaagcagaacgcgaagctcagcccgtccgtgagcgcctccaaaaaggacagcatgattattgtgcggaatggggagaatgcggccgctttctgcgtagtgaccaacggaaaggtggtgggttattatgaccgccagaagtttgatgtttccggcgtggaatggaatgatacctccaaggtgtacgccattccgattcagactgcggaaccctataagctgatttattccgccacgcgctcctgacctggttccggagattagcgaaagtcccttccggaaaatcttttccggaaggggccgggcgttggggcgtcctgttattcgggcgccttgaagttgtacacgggcctgatgcgttccacgatttccgccgtttcatggatgttgcccagcacgctttctccatccttgtaggccatcggcgcttcatccagcgtagcgcgggagacgcaggtggagaaaatgccctgcatggaagcttcgaattcctccagggaaaggttggctttggcctttttgcgggacatgctgcggcctgcgccgtgcggggaggaggaattgaattcctcgttccccctgccaatgcagatgacggagccgtcccgcatgttcaggggaacgatgagcttttctccaagtccggcccggacggcccccttgcggatgacgttgtcttccgcaatgtagttgtgcacggtgtcgaagatttccaggtccgcggcatcgtccagtagctcatgcagcatcacgcggcggttcagggcggcgaagcgctgggccaccttcatgtcccgcatgtagttcagcgtatcttctccctgcaggtagcaaaggcctttcttgcgttccttgagataggcgtccgggcaagtggccacggcgatcttctggtagcgctccgcaatcttcaagccgaagttgcgggaaccggagtggatgcacagaaaggcgtcttccgttccctgtgctatttcaatgaagtggttgccgccgcccagggaccccacggaacggcggtgcctgtctttctccgttctcagcacatccacgcagatgcgggagatttcatcatccagttccggatcatccagcagggcctggtggacggcggaacgggtgttccagccgaacgggacgcgttcgcgcaggcgttcgtcaaaccgggagaaatccggcagaccggccagcctggccgtaagcactccgcagccgatgtccacgccgatcaggttgggaatcaccttgtccgttttcagttcagcggtgaagccgatgacgcagccggctccggcatgcacgtccggcatgatgcgcacccggcttccttcaaaggcggggtggttgcagacgtccctgatctgggtgcgggccaggtcttccagttcatccgtgaacacgcgggcttccgtgtattttccgtcgatggtgatcatggttttattttcttttggttgaagggcgggggccgcggaaagcggcgctgcgccctgtgactccgttaccatagcgcatttactgactcttgcattatgcaagtattcatataatatgactttaaagttatgtttgagcaccttttcgcagaacgggggctgtccctggaccgcctgaaaaccctgatagaagtggccaaggcggggagcattgccgccgccgcgcgcggggacagcgcacggcaaagcctgtattcccgccagatcaaggaactggaggaattcttcggcgtggagctggcggcccgccgcgggaaagtgctggcgcttaccaggtccggatgggaactggtgcgcctggccagcgaaagcctgtgcctgctggacgatttcaaaagccggagccggaacctgccctaccggttcaccatcggcgccggagacagcctccacgcgtgggtggttgctcccgtgcttgcggacatccagcagcgcggcctgccgtggctctttgcactggagaacatccgcaacagtgaaattcccctcaagcttcagaacatggatgtggacttcggcatcgtgcgcaccagcgcgctggcggcggaagggctggaaagccgggccatctgctccatggattatgcgctgtacgtgcccgcggccctggccggaaaaaaggtgcggggaagggaggaggatttttcacgcctgctgggcatgttccccctggctacgctggggagcggttccggcttccatgcctcgctgaaacggaattgcgcggaattcggcatcaggctgcgggtgcagtgtgaaacgcagtcctttccctttgcggcgcgcatgctgaaaagcggggcgttcatggcggttctcccctgcatggcggaggcggagctgggcgggggattcgtcaaggtcacccatcctgcgctggacaggctgtcccgcagtatttccctggcctggaatccccgcctgctgcgcgtgaggccttccgcccggcgcgtgattgacgttttttccgctccggaacgggaatagcagaagagaaatcaatccgaatccacgccaagcttgttcttccggtagtggtccagggaaatgcggtagaagtacacgatcgccagcagattcagtagcgcgcctgcgccgaaggcccagttcaggttcaggtaagcgtaaatcttgcccccgaaaaacatgcccgtgcccaccccgatgtcaaaagccgtgaaaaacgtggaattgacggcgccccggtggccgcggtccgccatgttcagcttcatggtctggaaggtggggatgaagatgccgaagccgaagccgatgaggatggcggaggtataatagacccattccagcggcgcaaacgccagcgcgccgaagctgacagtcaggatgcccagcgagatgacggaaagttccgccacgcgcccgcggtcgatctgccggcccaccatgaaccgggagaccagcatgcccagccccatcagcgcataaaacagcccggcatacttgaaaccgtacattttcccgtacagggcggaatacacggccacaacgccgtaggagaaagaggcgatcatcacattcaccgccagtggaatgcccacgcgcagcaccaggcggtccagcacctttttgggcgtttcatgcacggactcctgaacggggcgcctgggggcgcggatgagggaggcgatgcccgccccagccaggcacaggaccagggagctccacgtaatcacgtaaaaaccgtactgctggtatacctggaggccgatgacgggtcccaggcacatgcccagcgtcatcgtcatgccgaaaaagcccaggccctccccgcggcgggaaggggggatgatatccacggccatcgtcggaccggaggtggtcatgccgccccagatcaagccctgcacgaagcgcgtcaggaaaaacgccagggcggtggcggccacggcataccctgaaaaggacagggccagcaggatataaaccgtgatgtaaatcttcttgcggtccccggtatccacccggtgcgcgaaccaggggcgggaaatgatggcggccagcacgtaaatggacatgatccagcccagccagccggaggaaacctgcaactgccccgtcaggtacagcgggagaacgggcaccagttcgaagaaggccagccccatcatcaggttggcgcagcaggccaggacgtagccccgcgtccagagaggcactttgacgggcggtgcggtttccgctgccaattcatctctggtccgggtcatgcaggggttgtacagccatcggaaaaagtttcaaacggttgacgtgtcatggcgcagttcctgccctggaaaggaatggcacaagatattttaaccacaatggacaaaatccccgggtgattgggtactgggaacagggccagcggatggacggctgtccggaacatcgaatttgcgccgttggcgaggtgggatgccttcttttttgcgtgcagggccgcgcaggcatggtagggtacagggtatgagcgtgatcaccaagcgtggagacagcggagaaacggacctgatgttcggcaaacggagccccaagacggccccgcgcattgaagcttacggaacggtggatgaattgaattccctgattggcgtagtgcgccattccggagtaagcccccggacggtggaaatgctggacggcgttcaggcgcgcctggtgggggccatgggggaactggctacgctggaggaggatttgcccaagtatgacgccaagggttatgcccgcattacggcggaggacgtagcatggctggaggaacaggcccatctgctggagaaggaatgcgacatccgcttcaaggggtgggcgcgccccggcaaggaggggtcactgggttccgcctatctggacctggcccggtccgtctgccgccgcgcggaacgccgggtagtggcactgaggctggacaatgccttgagcaacgtgaacacggccctcttcctgaaccgcctttccgatctttgctgggttctggcccgctttgaggctctggacgtaaaagaaaaagagagaaatcaggaataatacacctctcacagcttgtggcctgggagacttgaagtctcattccgtttctaatgtctctgtactgggagaattctctcattctggtaatggaaaagtcaacaggtttttatgtggaacaattgaatcatataaatcatcattgatgtattccctttgccattgatgcaggcatagattagagaaagagaacaatctattttttaaatcaatgattcaaagatttaaatttcagggagctttattcaaaatatgtctctagaaataatttatgcttaatataatattcttctatattaggatatttcttctggaattatcgaaattggcgtatattatatgttaattgatcaattaaaaattatagaaaacaattaaattaaaatccactttcggtgctatatattacattattatttaaaaggcaaaatgatagttaggaaatccgaataacgtaaggcacacttttgctcttctcttttctatttataagggcaaatgacttttcgatatcatacgaactaatcttgacgtgcgaaacttggaacaaattttttcataattttctccaccattttcgcatgatctttaaatgtggtaccatttttaaacaaaaacagaagtgtttggtaatttgcattccagcctttaattcgattcaggtaaagtgcgaatacttccttgtctgtttcactgtagaacaaatcgtaatactgtgttctgataattttggtagtcaatgcattcctgaaaaagtcagtcagtatgacttcccttggagactcaaaaccacgcgggacataaaactccttagttaaaaacccgtaggttgaagccctgacttctaatgattttttttcattgtgtaatataagggtatgcaagttttcttccggaataggagcatctctccctatagtgggactaaacgaaattccactggcaggatcaatgataaagctgtctgggtaactaatgacaaagcagttagaaaaacgttcccgttcttcgccttcaccaaaggttgtccacttatcaggtagtgcggtatcttcggccacaatgaaacatcccagccataaaaacaaggccacgggaataaggaggaatttgatcggattcatggcaaggggggcatggggtaattatcactgtcgataattttaggttcccaatggtttttcttagcatcaagtagcttaagctagttcccttaataaatatgaaaattcattgttttaatttaatttaagaaatccctctcgggacaatgtgttttctatatatgaactaatgtccgtggatggatgacattttttctcttcatatgctgcatcaatatttatttgaaaccattcggggaatttggacaaacgccccccataccatatttggaccttatcaccttttcttttgatgaggataatatcttgcggaataaatgttggaatgaggctttccttttcataaatataaaaattatcatcaattccattgcttggtttatatgaaatgatttccagatttttaatatatgtttcgctttctaaattattcaatccatgctttatatgaaaaaaaatatagataaaattaatgatatatattgtaaaaatagataagataatgagggatacgtattttattatttttttcataaaaattaaaatggaaaaaatgcattaacttttcctgtgtaaagaagaactttacattttgtattagcttctaaacgtgcttttagaataggagattctcccagatggcaacttctcaattcgagagtacattctgagcaaaatttaatatttttaaacatattagatattaaagttgattttttactttcttggagtcttctatcaccccaataagcaaaaactctaggataagaaccactagaactcccatgcataataacagtcaattttttaatacattgacatgacagacattcagagttaggattaaaatcagatggcgattttgttgttttgtttgctaatagatcgttaattcttctatcccaccaagtagcattttgacataaggcatggtaggttatactaatctcatattctactgtttcataagcacttgggtgtaattgtaatccatttaatgcccatccttgataagggctattacctaaaaggtctatgaaatatgagggcacgttttttacaaacccatacaaattccactcactctgttcctgaatgggatctctgttaatccacctgccgtctgctggattgaggtgccgataattatagtagacaagtcccagttcgtcatccgagaactcgcaggaaaacctgaacttgttctcccgggccatatccccttcttccgtgataggacttccgaagggagcatactcgtagcgggcttgttgtttctgctgaccgtcgaagatggaagtgacattcttcaaggcatcgtacatgaagtagagatgctcttttactttcattccgttctcctgccagcatgtcatcatcaggatgcgcgttgccatgggttccgtcgggtcccacaggtagctctttaccagcaaaggttcgggatgcgtcaaatccagctcggctacctgcaaatagtcccggtacaggaaccagcaatggctggatactgccccattgacggtggccttcttctcgaagcgccttcctcggtagtcgtagccgcaggtgatggttgttctgccatcctggctggtgaagacgatggggcggtcgttggcgtcgtaactgatttcccagatacctgtcgaggtcctgatgcgggtctggttgccgtcggcgtcgtagacgggggtaaaatgttcttctctcccggcaatctccgcgtactggttaagacagttggcatcgtaggatacttcctcttccagttcccggactgttttgcggttgccgatgttgtcgtaggaatagataaagcttcttccccggctgatccggtcttcgaccagctcgctgcggctgttgtgggtgaagtttctggtggttgcaggtgtggcgacatcccaggagtcccggcgctggatgggacgccccagggcgtcataatcgtactcatggcggcccgctgattcaccatttgctcccttcctgtaaccgatggcggttacgaggttgagcctgggatggtaggtattgcagcggaccatgccgttggggtaggtgagatggttgaggaagccgctggttggatcgtattcccaggtaaaggaagatgccaaaccttccagattcatcccgatgatgtcacctttggagtcgtagtcaagataggagtgctgcacggtacgggttccaagcatcaggcggcagccggccgaacggccaaagggatcgtattcttcctgaagagagctttccacggttccaaaggaagtgtcctgaatcatgttgccgtaaacatcgtaggagcattccctgatgccggaggcgtcccggacgtaggtcatttgtccgatgtggttgtaggtgaacttccatcctggcgtatcgtcactgtgggagacggagacaagttctccggtgagaggagcataggcgtaggtagtgacgattcctctggctttggtcagcgtctccagacggttaaatttatcgtaagtcttgattgtggaggagccgtcggcataggtctttttcactttcaatcccgtggcttcgtcatagagccccgtggtggtatctccgtcggttgggttggaaggatcagaggtaatgtctccctcatctgccctgaaggtagtcaaggtaaccatatggtcggcttcatcgtaggcgaagcatgcgggctgaatggcggtgccgtactcggctatctttctgccgctccctgacgcgctagtgcccggaactggagcaaatgtacctgatcgactacaaggtgcgcgtgctctctcccacccggacgaacattccggacgcggcggaagaaaacggcaccggctccaatgtccgcgttctcattgaatcttcggacggcgtcgcttcttggaccacggtgggcgtttcctacagcatcattgaggccagtctagaagttctggcggacgccgtcacgtgcaagctctacaagacggagcaggccagatggcgcgcggaatgctgataaacggcgcccctgaagaactgacctcttgacgatcgttatattctctctgaagcgcaaggcggcttccgccaggaagagaaggcgtgctccaggtaaaattcatttaaattttacttcatccggtgttggcatgttttccggaagatcaaagggagggattgtgggacaatggtaatgaagtatatggggagcctgtttcgtggtcaggggatggcttttaggtttaaagtgaaatacttgaacggtacctggagattcattggcataacaatggttttcaacgtcgtacatcaatgtccagttgacggttgaaaaaatgccgtaccgtttgtcccttccatgttggtcccttttggtgtattcgcccaactgggcgattccctggacaaccacgcataaataagggcggcttcccaggcttacaggctgttgccggccattgtggaaaatgagttcctggttgaatggaatgattaaaaccggaagccatccgcgggagcagggccattccgggaacatagataggtatttccattccttttgtacgaccggcagttgatttctcgtgaccatccataaataatcacggcaaagaggctgtctcaacatcatccataatagagggggaggcatcgtattgcggttgtaggcctgtatacattcctccccgcagccaagtataaaactcaatccccaaagctgggagtccaagtcaaagctccgttcctcttcacaccatcccactaactgccggtagctgcagatgcaactgactgcctccggattgattttcaccaataccgtcttgttattcggagacggcatatggaataaatcgacactggcatggagcgactgaagtggtagtaatcccataagtatgcaataaatgaaaatacggaaacagttagcaaatatctttttcatttttttctttctttttccactcttcgagaatctcttctcttgatttattcattttgatcatattcggatttaatgttttgagttcatggtgtcccgttgatgttctaagaattgtaatatcagaagtaaaaaaatgaataaaattacattctttattccctgtctttactctgaatattctcctaagtggagacaaaatataaacggattttatatgtcctgtttcatgaaaacaagcaatcgttttaatatttttattcgctagaattttttccattaagggatgtattgttactccattttgtcccgcaaaaattggagctcttgtttctccctttccgtgtgaaatcattacggcaaattgtaatgcatcaggtttattctgttgagaagcttctgttgctgctttaaaagcctcctccggagatatttgattattcaaagaagtttttgaatcgtcattaaaataatttattaaagcgttaacatctccttcataaatatccccattaaaataaattcttttcttttttatttgtgtggttagatgagttttatagaattgtaaatttttttctattttacttgattcttttactatattttctctatctttagtaaatgttattaattgtgtttcatcattatgaaaagatgttacaataaataattttttcccaatatatctatacagtttattactctattatcaaggaatccatacaaattccatccaccctgttcgacgataggatcgcgattggtccacctgccgtctgcgggattgaggtggcggtagttgtagtaaaccagccctagttcgtcgtccgagaactcgcaggagaagcggaacttgttttcctgcgccatgtctccttctgtggtgagaaggctaccaaaaggcgcgtactcgtagcgagctcttctcgtgtgttgtccatcaaagatggaagtaacattcttcatgacatcgtgcatgaagtagagatgcccttttactttcattccgttctcttgccagcatgtcatcatcaggatgcgtgtggccatggattccgtcggatcccacaaataactctttacaagcacaggttcaggatgcctcaaatccagttgggctacctgcagatagtcccggtacaggaaccaggaatgactggcgattgctccattgacaaaaactttcttctcaaagcgccgtccccggtagtcgtagccgcagttgatggcagtccggccatcctggctggtgaagacgatggggcggtcattggcgtcgtaggatacttcccagatgcccgttgaggtcctgatcgtggcctggttgccgtcggcgtcgtagacgggtttaaaatgttcttctcccccggcaatatccacgtactggttaaggtcgttggcatcgtaggaaacttcctcttccagttcacgagcggtcttgcggttgccgatgttgtcgtattggtagctgaagcttcctccctggctgatccggtcttcgaccagctcgctgcggctgttgcaggtgaagtttctggtggttgcaggagtggttccatcccaggagtcccggcgttgaacgggacgcatcagagcgtcgtaaccgtattcatggctggccgccgattctccatccgctcccttcctgtaaccgatggcggttacgaggttgagcctgggatgatagatattgctatggcccagcccaaaggaagcgtcctgggtcatgttgccgcaagcgtcataggagaattccctgatatcaaagcgtccctgacggaggtcatctgccccagatggttgtaggtaaactcccatccgtcgtatcgtcattgtgagagacaaagacgagttctccgataagggatgcataggcatatattgtcgcaatgccgcgtgctcattgaatcctcgggccctgtcacatacaagctttacaagagggagcaggtcagatagcacgctaaatgctgataaattatatcagtttctgtttttataaactcaaaagtaaaaattttatcaaataattttaatgcccgtattctttaaatcctgccagtttaaggctggaggagaatacttcaccaacggaagaaacattttctccttctttaaatccgtcttcctggtagagttttaatttttccttcatggtgccacgtgaagtagatttaagtctagagccggtatatatttttatgccggagatgctgcttttcatgacaattagatcatgatagaaaatattgggtagtaattgtttttgttggtagatgagcaactgttctgcaggtggtccttcaacttggtaatagtattttgcatattcattttttaattgctcaaagcttgattgttctagtacatttttccaatgatggatactccatgctgtgtatccataattaatacaagtaaggataattaacccagcgatgacaaaaataaaaattcttattaattttttcatttttaaatttaaattaaagaaatggaaaaaatgctttaacttgatcttcgtataaagtaacttcacatcctgtattttgttcaagccgtttttttaaatacggagatgagcccaaataacatgctcgtatttcaagtttgcaagatgaacaaaaattaatttttttaaacatgtcggatatttctgtcttatttgcattttcagttaagaacctttctccccaatgcgcccttacatttgtatcattttttctaatccagggttcttccccatgcataataataattaaactacggatgcattggcaggattcttcacattctgaattcggtttaaaatctgaaggaacatgtgtaacttttcctgctaaaagtgccttaatagctttatctcctaatttatctaactttcttttacaagcaaaatacgaaagtttaatgcctctgctctggccaactctatctggtatgggaggaggagtaaaagctggatctaaaggagaggagctcaccattcctaaaaaatcaacatttttctgaatatgattttttataaacccatacaaattccatccaccctgttcgacgataggatcgcgattggtccacctgccgtctgcgggattgaggtggcggtagttgtagtaaaccagccctagttcgtcgtccgagaactcgcaggagaagcggaacttgttttcctgcgccatgtctccttctgtggtgagcaggctaccaaaaggcgcgtactcgtagcgagctcttctcgtgtgttgtccatcaaagatggaagtaacattcttcatgacatcgtgcatgaagtagagatgcccttttactttcattccgttctcttgccagcatgtcatcatcaggatgcgcgtggccatggattccgtcggatcccacaaataactctttacaagcacaggttcaggatgcctcaaatccagttgggctacctgcagatagtcccggtacaggaaccagaaatgactggcgattgctccattgacaaaaactttcttctcaaagcgccgtccccggtagtcgtagccgcaggtaatggacgttctgccatcctggctggtgaagacgatggggcggtcattggcatcgtaggatacttcccagatgcccgttgaggtcctgatcgtggcctggttgccgtcggcgtcgtagacggggttaaaatgttcttctcccccggcaatatccacgtactggttaaggccgttggcatcgtaggaaacttcctcttccagttcacgagcggtcttgcggttgccgatgttgtcgtattggtagctgaagcttcctccctggctgatccggtcttcgaccagctcgctgcggctgttgcaggtgaagtttctggtggttgcaggagtggttccatcccaggagtcccggcgttggacagggcgtatcagagcgtcgtagtcgtattcatggcggcccgctgattcaccatttactcctttcttgtaaccgatggcggttacaaggttcagtgtgggatggtaggtattgcagcggaccatgccgttggggtagttgaggtaattgaggaagccgctggttggatcgtactcccaggtaaagggagaagcgatgccttccagatttatcccaatcatgccgcctttggagtcatagtcaagatgggagtgctgcacggtacgggttccaagcatcaggcggtaaccttcagaacgtcccaaggcatcgtattcttcctgaagagagctttccacggttccaaaggaagtgtcctgttgcgttcttccataggcatcataagaaaattcccttaatccagaggcgtcccggacgtaggtcatttgtccgatgtggttgtaggagaactcccatcccggagtatcgtcattgtgggagacggagacaagttctcctgtcaatggagcataggcgtacgtcgtgacaatgcctctggccttggtgacggtttccggacggttgaactggtcgtaggttctgagaacgcaggagccgtcggcataggtttttttcagttccagatcggtggctggatcgtagagccaggtggtggtgtctccgtcggttcggccggaaggatcggtggtgatgtcgccttcgtttgcacggaaggtagtcagggccaccatgcggtcggcttcgtcataggaaaaacaggccggctggacggcggtgccgtactcggtcgtctttctgccgcggatatcataggagtagtaggtcgtgcctcccaaagcatcggtgatgcaagccacggcgtcacagcaggacaagtagctggtggtggtcacgttgcctgcaggatcggtgactttgacagtacgtccggcaaggtcagtttctgtagtagcgacattgccgcgaccatcggttttttccagaatcatccgtgtagaggtacagcagaactgttgtgaggaacggattccggcgtgatcagtctggtttgttgtaaatccatctacgatgactgattcagctgtgatctccgaagttggaatccggctgaactgggtgcgcttggttggagcagtatactccgtccattttacgctctgctgactgtagacgtccgtcgaaatggtcttgctttccaatacaggactgagttcggaaaccatattctccgtggtttgaatgagggggaggccgtcggcattataggtcgtggaagtctgcacctggtagacgccgtcttctcgaacccggaagcaggatgaggtttccgatatcctgttttttgaagtatcctccggatgcagagtgtccaatagaacaattcgtcttacggcttgtcccagctcattgtagactgtgaccatgggagcaagatcctctgtctgggaacgcacaagcagtcctttgtcattgtaattatttctagtaacgatgatccctcccttggtattgggctgttcctgccggatgatttggccaaaaccgttttccagcctccgcgacagcacgactcccctggacaaggtcgtggtcaggatgccttcttcggtcagttccagccgggtctccatctcacgctgccccgtgccaccctgaaacaggacaacgccatcatagtacttttgggtgaccagcgtagcgcctgctgggttggtgacggttgtcgtaagctgatcgtggctgtactcggttcgtgtgatgcgtcccagcaagtccgtggaggaaacgacccgtcccagatcatcgtactctgtactttgcatcgtcgtcatggcccctatgtcgcggcgcgtggcaatcgtccttcccgccgcatcatagctgtaggaattaatcgtttctggcgtagtctcggtagccgagcggatggtttccaccagctgcttggccgagttgtacccatagctggtggtgatgccgtcttcatcggtttccctcaacggcccacagcacatccattccgtcgtactggttctgccgttgcccctcgtcgtcttgacgagcctctgctcgtcatcatattcatagtcctccgaggcaatcagcgaccagccttctccggtgtgaacgtattgttctttcctggtggtggcgccgttttcagcaatgtattctatgttccgggtactttgtccgggaacgatacttccattagcctgcacagtctccgtcaccttgtggagagccccgtattccgcggcggcttcgtaagtataaacggtttgcaccccgtcaatactctggctcatcttttgcctgccccgggcgtagggatattcggctccttccccataagtctcttctacactcgtatgaacctggtcggaacccagggcggtttccgtgaccgtggtgcggttcacctgcgggctgtcttcataggtgtaagtgcgtttgagaagcgccgtttccgtcccatcctcggcaatgattacttcagtttccgtagcgggtctgaagtcattgaagcgcaggtcggcgtaagtggttcgggtccctctctccccgcctccggcccagggagcagcggagagcacggttttgccctggtcatcgtactcgtagcgcgtatagccgccattgggtttgagttccagggacacccggaactggtcgttgtaggtatagagggtggtctgggccagagaggtcttgtatccctccgtccggctgatggtcagccagccgccgtcggtatacttcttcactgtccgggtacaggaggagggtgtttcctcgttgatgccctgaatagtttcaaggcgctcccacttggaatcgggcagggcgttgcgttcaatggtgcgaacgatgcgctcctctccctcccccttgacgatggtcaccttgttgccttcttcgcggcgttcgatgaaatgcggctcctgaccggcgcgccggttggtgatatgggtgaccttgactccgttttcaagcgaggtttcatagacggccgttttgtagggctctccggtaacggtgaatccgccttccccgtctgggatggtcttgccgggagcataccactccagggtgagcctgtcgccttcgggaatgcttctcatcaacccctgggcgcgggaataaacgctggcaagggagccgttttgatggtaagtgacctggaccttgctgaagtactcctcggcagagatcacatggcccgaagagctggtgaccgacacgacctctccggtggctgccgagaagcgcaggaccatgccgccgggaagaaccatgtccatgaaggcgggagtaccctggaggttgggagtaagatcttcgttgagaagcctcacacggtagttgaccttcctggaagagccgatgggagaagcatcgctgcttccctcgttagctttgaaatagagatggcttccggaggggcgcttgacggtgacgcggcgctcgtcagccgagaaggaagcgctccaggccatggggtggttgtagcgcatggaaaagccgctggaagccggggcattagtggtggcagagcgtgccgtcctgatgaacttggcgggagccggaggcgtgggtcctgccggggaggaagggttgatgcaggcgttgccctggcaatcctgctctccctcgggatccccggagtgggctgtgtctggacacagtgttcgtccccttcctcattgcactcacattcacaggggcagggttcctcttcctggtccggctcgctggaagaagaggaaagggaacttgaactgctgctggaagatgagcttgagctcgaagaacttgatgacgaagagctgctgctggaagacgagctggaagaagacgatgaactcgaactgctcgaggaggagctggaagacggagcgctgctggaagaatccggctcctggggcggcaaggaactgctgtggaaactggaagacgaccagctgctggaagaagatgacgaggaagaactcgaactgctggaagacgacgaactggaagaagaaggcggcgcgctgctggaggaatccggaggctcgggagccgaagaactctgcagggagctggaagacgaactgttggaggaggaagagctcgaactgctggaagaagaactcgagctgctgctgggcttgggatcaaactcaaacgaatctcctccccctgccgaactgctcgacgaatctccttcttccacctcctggtacaggttgaccagagtcaggacggtttctccttccttgccggcaggcgtgttttccgccagcaggtaatagtccaggtcgggctctccttccttgtcgcttaccagggcaatgcagaactcctgttggtcctccgcggcaggctggtgttggtggacgatatggcaccagtagtatccctgttcaaactggatctggcggcggagaggcgtggaagagcccggctccgtggagagttccatatccttggcgggaatggaaagggagatggaagagtgggcgtggaggtggagaaaacaggtggcgggagccatgaccttgaggtacccgaaccattcgtgacgggtgggggaggaagcagttcgtttggggataaggacaggagcggagaggccgttgaccaggaagtcgccctggggctgcccgttggggtacatgggaatgaagggatagacggtgtccatggcgccgatgttgaaagtgttgttcatggtattaaattaagaattatgaaatagttgcgactaccatgaatcaaaaaccagcaaagtaaacacgccgggaacgttatgatatttggtgagtttttgaggcggatggcaacgtggaaaaagggaggggattcttctccggtggcacgtatttctttgccatatttccaaaatttacccattgccagggtaaaagacagcgtgcaggaagagaaatactagcaaaaggtaaaggagatttttctctgatgaaccaagtttcccgcgttccactggagttattgcatttaaaaattaccggttggattcatgaccgcactaccatcctagtgagcataagaaaggagtttttatagaacattattcaaggtacaaaaaaaacttcatcaagtggtaacgacttttatctctattttttgccgcttgcggattttctgcttgtgttgaagactcaaaaagaggagaagatgggtacatagaattaccctcctcccatgaaaacctgttcttttgctattggctgcttcttaggaatttgcggtatttttccatccattgccgacactacggtgcgctatccgtcttcctctccgtcccatctggaaaaagggaagccgtttcaactggtgtttgacaaggccgtggtgcccgcttccgaggtgggaaaaccggcggacccggaactgatgtccttttccccggagaagaaaccggtggaactggcgctgggcaacggcgccgggacggccatgccggaaggcgcgaagctgatgttcgttcctccttccttgaagttttcttccaaatggattactcccaacgtgctggagtgcgttccgctggaggaggttcccttccggtccacctatctatggaaaccggcggagaatgtccgttttctggacggttccctggtgccgtccgttccgctgcgtctgacggggcgcacgacctggaatttcttcctgtcttccatggacaggggctggcagggcagtgaagtttacccgtgggagagttttttcctggtgattcccgacgcagttctggacaggggcaatcctgcgaatggcttgtatcgcgacggcaaggggttcctgatgcttcccggttattgctcatggaaggaggcattggaaaagaacctccgttttgccggcgtttcagatgaagagcagttgaggtccgcagattttatgaagcagctcaaggcgggagccgcggggtacgatgcggggttccggctaaggcctgcgacgttgaaggaggtgagagacgccaaatcctaccgtgtgagaaatattgcaggggagggaaggttcagaggccgtccggacggcatggttgttcccggcgtgtatgtcattcagccggaaggaatgttccggtatggcaggaattattgcctggtcagtttggacgcttccttcctgtcctcccggggaggagggcagaaaaccggatgggaagaaatcaaactgggggccgtgccccgtttttccgcctccggttattaccatgcgttttccgggaacggaggccggtttactctggaatggactctccctgtcctgattgaggatttggaacggttctgccgggaccatgtggagtttttcgtggagggcggcgggaagccgatggcttacggtgatcaggagggaggctttaccacatcccttgacggagaggatgcggagacggccgggaaaatagcaatccgcctggacagggaacggctggcggagatgaagcatgcccggccccagtggtatacgtccctgccttttctggtgagcgcagacgaggccgtttttaaactgcaatggaggctgaagggcgtccggtccgtggatgatcaggaattggcgcgaaagaatgcggaaggttccgtggaagtggagccggaggatccgtgcctgtatctggatgcgggcaacaacggcgtcatgtacgccggatcccgcaagttgaaagcttccgtgagcaatttgaaggatttgacggtgcgcggctaccggatcagggacggccaccggcaccagacgctggcggcctaccggaagatttatgaacgggaccagtccgcgcccctttcccgtaccgtgacggaccgcgaccaaaggcattttctgcctgcggagcttcttgcggcggataagacgggcgcgctgatactggacgtgcgcggcaaaacggaagcggccatcagcctggacggcctgtttggcggagccgtggagccaggcatgtatttcattgaggtggaaggccgtgtcagtgatccggtgctggaggcgtacaggctgtttggcgtgccgtcggaaaacggaggcagaaggaagttcgacggaaaggaggcatcctacgccgcgcaggccgtcgtgcaggtgacggatttgggcgttctgcataaaaagacggcggataccatgtttgcttacgtgtattccctttccaccggaaaagcggtggaaaaagcgcaggtccaattgctggatgcgaacggctccgttctggcttccgttcccgtggagcacggttccgtgattttgcccatggccgggatgaacggaaaggccgcctatgttcgcgtcctgtccggggtggacagttacctgagccccctggaggattggccggggcaggtgaggatgtggtcctttggcgtgaagacgctgccctacgaatgggaagccctggggctgaatcccgccactaccgcggaaacgagggtgttcatgttttcggacaggaacctgtaccgcccggcggagaccatgcatttgaagggaatcgtgcgctccctgctggacaacaggctgggcctcgctcccgtggaggaggtcaagctgacggtcagggacggacgggaccgggaagtagccgtcaagcaggtgaagttgtccgatgcgggaacctttgacctggatttcacgtttcccggggaagagacgggaacttacagcgtccttgccagcctgcggctgaaaggggattccgcggaagaggaaaaagaaggggcagaggatgattcctccgacgaatacgattacaagaagtattaccggaaggagtttgacaagaataaccgggagttccggtatgaggtggaagtagccgagttcaagcggaacgagtttgaagtggaggagaagattcatgaattgaagcccggcgctcatctcctgaaggcggatgtgaaggccacgaattttaccggcacgcctgtttcaggcggcaaggtgaactggtccctgcgcagtacttcctccaacttttatcctgccggatacaaggattaccgtttcggggattaccgtgatgacgatgggggctactgggaggcctattacggttattccagcagccgttcctcctcccacatgaagcagcagtcctccgtgctggacggggaaggcaggaataccgtggagttctccctggacgggcagtccttcccgcgggtcaggaggctgtccctccaggcttccgtggtaaacgggaatgagcagttggtcaaggtttcccgaggcgccgtctggaatccggcttccgtgtttgtgggcgtgaagaacagttcttccatctgccgccagggaacgcccctggatttgcgcctgattgccctggggctggacggcaagccctatgcgggcagcggccttgatctcaacatgaccgtgacgcgcaccgctttccgtcccgcgcgctacgagagcggagatgccaccaccgtgcgcaatgacgaggtaaggagcacggtgctggaaaaggccctgacgcttgccccggcggattccgcggatgtccgtacgggaggaaaagccgtctccgttcccaccccgcaggacggtatttacgaggtggctttttccggcagggacgcggaaggacgggaattccgcactgccgtaaagtactgggtttacggcagcgacgtttccccgtgggagtaccatgacggcctgaaggtgaagatcatccctgacaagcagttgtacaagccgggagagacggcccgtctcttgatccagacgcccattgagggggaggtgatggtgacagtggagcgggaaaaggtgcttcggagttttgccagaaagctgacgctggacaatcccgtgattgaggtgcctctggaagaggcggacgcgccgaatgtctatgtttccgttttcctggtgaagggggcggacctgagcagccgcaaggtccgcaatccccagttgaagctgggatatgccgcgctgaaggttcagcctgtccagcataccctgaatgtaaaggtgtttccccccgccgggatgtcccggcccggttcccccgccgtggtcagcggcgtggtgacggattattccggcaggccggtgcggaatgcggaggtatgcctgtttgcggaggatgaaggcaccttacaggtcatcgggtaccagactccccgtcccatccggtacttctatgcggaccgccccctgtccgtgggcacgtggacgacgctggaacaaattctggatgaagactggggtggccgctccacggacaacaaaggagttttcatcggcggcggagattcctcggacggctcccgcaaagcgccggagaacctggatttaaggaagaatttcaacccgtgcgccgtgtggctggcctccctccgtacggacggggagggccgtttcaaggccgagtacaggaatccggatacgctgacccgctaccgggtgatggcggtcgccctggcgggagctgccgatttcggaaccggggaaagcgcctatgtggtaaacaagcccgtgatgctggaacccgctcccccctttaccgcaacggagggtgattccctggacattccggtgacggtcagccagacgggtgacaggaagggcccgtgggtggtcacgctgaaatccgggaccgctgcggcttccgtgccccagcccgtccagacgctgactttgaacgggaaccagccgaaaacgctggtgttcaacgtaaaattcacgcagccgggggaagcccggctgacctgggaaatccgcgccgcagacggcagcggcacgccttattcctccggcgtttattccttgctgaaggattccgtggagcacacgtttgaggtggtgcctcccttcccggagctgagggagctgcgctgcttctcgctttcctccggccggacgctggatctgccggggttgctggcgactcccttcctgaaaggcacccccatccgggtgacgctgggcacgtcccccctgctgtatgcggacggcagcgtgaattacctgctgcgttatccgtacggatgcctggaacagctttcctcctccacgctgccctggatttatgaaccgctcctggccaaatatctccccggtttcaagggaaaatcgccggaggaccgttccagggccctccggagcggcgtttacaaaatcatgaaaaaccagctttcttccggcggcctgtcctactggcagggtggcacggaggtgagcgagtactgcgcgtatgccgctctggtgctgaccctggcgcgggagcagggggtttacattccggaacagggcctcaacaagctgtacacctatctggggcgttccctgtccgcccgcccgcgggaggggctcctgggggcatgggtgctggccagagcggggctcatgcccgcgtccctgctcaaccgcctgctggaccatgccgctgaattgagggcggaagaccgcctgtacctggccctggcggcggccctctcttcccgtgcggaggcaaaggagcaggcccggagcctgatgaatgtttccggggaggaaatgaaacagccccgctgccgtcttctgctggcgctggcggagatggcgcaggcccccggtgaccgggctgtccgggaaaggctggaacgcctgatcgtggacaggatgtccggctctttcggaggaagggccccctattccacctggacttccggctgggatgtgattctgctgggggaatacctggaaggattgcaggaggcgcccctttccgccgccttccgcgtggaccgcggcggccggacgtttgacgggatatgctccgtgtcttccccgtcccggttcctgaccgcggttggggagaaggccgtgctcagccttccggaagcgggaacccgggtatacggcatggcggaggcccgcggacgcagcaaaacgcagcaggacggagccgccgtcaacaggggctttgccgtttcccgcgtttatgaaaggctttctccggaaggaacctggacgcctgcggcggagtttgccgtgggggacctggtgaggattacgctgcacgtggacaagtccgctgacccgctgacgtatgtggtgatggaggattacctgccctccgcttttgaggccgtcaatccggcgctgctttcccagataccgggaggccgggagagcgagacggcggacgcaggaaaccgctggttctactggagcgggtgggtctcccaccgtgaattcctgaaggaccgggtgcgctttttcgccgattcctggtcgggaggccgctttacggcgcgctacctggcgcgggtgaccaagtccggctccgttatcgccccgtccgccaaggcggagctgatgtacaagccggaaacctacggattgagcattccccagaaactgaccgtctccgcggggaagtaagtgcagtgttttcatgatgcggcgcagatctatgaacagggcggttttcaaaaagctccttcaacggaaaacccttctttggattgccggagggctggccgccgcgtggctgcttgcatggtatgccgtgccctggctggttcccctgccggaagggctgctccatccggaagagcggggcgccatggtcctggacagggacggcggcagaatcgccacattgccgggaccggattattaccacacggagcctgtccggctccgggaggttccggacatgcttcttaaggctacgctggcggcggaagacaaacgctttttcagccacggaggggcggatttcctggctctggcccgcgccgcggcggcgaatgccgcaggcggggaggttgtgtccggagcgtccaccatcacccagcagctcgccaagaatgccaatcctcccgcacgcaggaacctgtggaccaaggcccgggagtttttccaggcccggcgcatggagatgagcatgagcaaggaggaaattctggagtcctatttcaaccgcctggattacggcaatctgcgccgggggcccgccgcggcggcgcgtttctactttggccgggagatggcccgcctgtccctggcggaatgcgccctgctggcggggttgccgcaggggccgtccttcttgaaccccctccggcatccggaacgtgcgctggaacggcggaaccgcgttctgcggcgtctggaggaggaaggcatgttcccggcggacatggtgaacagggccttgcaggaacccctgttcagcgccggaatggaagaagggcggcagccggcggctccccatgtaacagccgccctgatgcacgcaggacggacgggggaggtgcgcacgacgctggacgcctccctgcagcgcggcgcgctggaaatcgtgaggagggagctggaacgcttgaaaggccatcatgtgacacaggccgccgtagttgtggcggaaaacgccacggggaatattctttgcctggtcggttccgcgaaccggaagcatccggcgggggggctgatggacgggacttccctgccgcgctcccccggttccgccctgaagcctttcgtgtacgcccaggcatttgtcctgggggcctatccgggaaccgttcttccggacgttcccaccacgtaccggagcgcgcacgggctggaagcgccgcagaattacaacagggcctacatgggtcccgtttccgtcaggcaggccctggcctgttcccagaatatcccggccatgagggctctggataccttcggcggcccgtcacggctactgaaactgctggaaaacctgggtatccggggcatccagggagacgccgcgcattacggcctgggcctcgccatcggcaatgcggaggtgaccttgcgggatttgaccggggcttatgcgtgcctggcgcgcggaggctccttcctccccctgaagctggagcagggcgcttccgttccggaacggcccgtactgcctgcggaagcctgcttcatggcggcggacattctggcggaccgggaagcccggatggcggcgttccatgaccgggagctgatgaaccttcccttccggtatgcgtgcaagacgggcacttcctccgatttccgcgacaactggtgcgtgggcttcacccgtgaaatcacggttggcgtctgggtgggcaattttgacgcctcccccatgaagcaggtggggggcatggatggagcggcccccatttttgccggggtcatgaggctggctcaccgcaatcttgccccttccttccccggtccccctcccggcatggtgcgcatccgcattgattcccgcaccggaaagagggcggaggggctggatctgccgcaagcccatgtccgggaggaatgggcttccccggaaacgatgccgcagccggcctccccggcggattacgatgccgtgggacgggcatatctggacagccgttatacggagtggtttaccagtccttcctgcacggtggggaataccttctgcctgcttccgcgggcgtggtccggggaggctccccgcatcctggttccggcagacggctcgcgcctggcgctggatccggaactgcccggcgggggacgcaggctcaaactgcgctccaacctgccggcgggggcggtgtggtcatcccccaccctgaccgtcgtgcagtatggagaagaggcttccgtgctgctggaaccgggagcgcacgtcattaccgtgcgccatccggagctgaacctggagcagcgttcgtcaattaccgtcagggaactgtaacaagaagccgggagttttcctcccgtgcgcacgtggaaaaagcgttccgctcagtccagcggcaggatggaggtgaccagcatcttgaaccgttcctgcgcaatgacggaatgaggcactccggcgggaatcaggagagtcttgccctgcggaaggttgacctcttcattgcccacggtaaaatacgccgtcccgtccagaatctgcaccagggcggggccgggcgtctggtgggtggggaggagctgctcgtcgtcaaaagccaggatggtcatgttgacgcctttggaacgcacaagggccaggctggtgatttgcccttcgcggtattcaatcaggtcagcgtaattgaaaggcgcccgttcggggatatgctgaattgctgtcatgcaggttggacacactcatttccccttcccgtttccgccatgacaggcttccgggaaaaaggtccgctccagacccgggagcggaccttggcattcagcattcatatggtgcttacttacgggttcaacgtcctgagttcataggcgtggggtcgggttcacaagtaaacagcaaccattttatacatgaaaagtacaatttgcttcaagaaaattttggtgaaaaaatacagatttaattctgctgcaaggagaaccggatttaacgcccgcatgtggccgtttccgcctgcgggcgtgtgccgtcagcggttccgccgcctgcggccgggcgtgcgcttctcctttctgcctggggaggctgtcttttccggctgccgccgttcctcccgtgaggcgatggtaaaatccgcccactgctgttcccggtccactttcacgggaatgacgggaatgcgcagccctgcgcacagcacggagccgtggtcgctcttccagcggttggcgaatgcctcgtacacccagcggccgccgggaagcttgtccggcttgatcagccccttgatctggaggcgcgggatttccagcagcacgccgaagtggcgcgtttccgtaatcagggcctcgtgcacttccggatggtccgcatagcactggccttccagccattcgaaaagcttcatccggttggcgtccttttccgcactggcggaagtgcgctccgtctctgaaatgtgttccgcgtcctcctccagcctgcctacgctgccggcgcctttggcccccttggggggattggccagcaggggattcagggagcggtgaaccaccaggtccgcgtaacggcggatggggctggtgaagtggcagtaattggcggtggccaggccgtaatggcccaggggctccgtatcgtacctggcccgcatcaggcttttcaggagcgccagcttgagcaattgctcgtccggggaacccttgatggacttcatcagctcattaaggtactggcgctggccgatgtcgtggacggggtgcccgtacagtttgcacaactggccgaattcaaagagcttggcggaatccggttcttcatggacacggtagatggtggggcggttcctgtttttcagcgtcagggccacggcctcgttggcggccagcatgcactcctcaatgagctggtggctctcatcgtactcttccgtgatgatgtccgtcacgcggccgtccttgtccatgacggcgcgcacttccgggaagtccaggtccagggctcccttggcgtagcggttgcggcgcaggatggaggccagcttccaggcttcacggaccatggagggaacttcccccttgtcatgccctttcagcatggtgaaggcctcctggtaggtcaggcgcgccttgctgcggatgaaggcgtccgcgaagcgggcgtggagcatcttcccctttttatcaaacttcatttcgcataccttcgtcaggcgcacgacgtccggccgcaggctgcacaaatcatcggaaaggcggggaggcagcatcggaaggacgcggtccggcaggtaggtggagttgccgcggcgcagggcttcctcatccagcgcgccgccgggcttcacaaaatgggagacatccgcgatgtggacggccagcgtccagccggacggagtggccgtgatggagatggcgtcgtcaaaatccctggcgcttgccgggtcaatggtgatgacggtgcggtccgtccagtcctcccggcggcccagttccgcggaagaagggtttttccggaaagattccacctcctgaagcacggaggcggggaattccacgggcaggtcatactttctgatgacggcttccatgtccacgtggggatcgtccgggtagccgagcacctccacgattttcccgcgcggggccttcttttcttccccgcgggacacgggttccacggaaaccagttggccgggaagcacctccatggcgggtttttccaccagttcaatgtattccggagagcctacgccgtccccgagcacgcggcccagcttgttctttccggcgcggaaaacgcccagccagcgggagcgcgcgcgttccgtcacttcctccacgcgggctttcatgccggtatccggagaagaaaagcggtccctgcggacgtttctccggcccttggccgccttgcgttccacgcgcacggccacgcggtccccgtccagggcggttcccaggtggttgggcttgagctccagctccggaatggcctccagatcccaccccaggtccgccgcggcgggatccccctttttggggagaaaaagaatcttgccggagcgcaggatgcggatcatgccgtgcaccaggttccggcgttcccgtttcagggcgtatctccccttttgcagccgcacgagcctgccttcctcctccagctggtccacaatggcgcggaagtcctgcttctgccgggaatccacgttcagggcgcgggccagttctgatttgctctggggttcgtaatgtccgtcttccatgtgacggaccaggcggtctttaagggaattattcatcttgcggaagttccgggaaaggagtcttccattcccattgatgccatcataaggcggtttttgcgccgcttcaaggcgcgggcggtgcattctttgtccgcctttctccttgccaggcccgggcttgcgttatctgggccggagcgtgccttccgtggtgccgagctgttccgcgacgtccagttcccggatgagccgggccgcagtgcaggagccgtccagcaattcccggtagcgggataccagaaggcgtgctttttccggagaatcgtccagcagttccacgcggaagcgggaaaggccctgatggcggaaaccccggaaaaagccggctcccgtctgcgcgcggccgttgaacagggtgttccggcacccggcgtccgccagcaggggatggagctgccccacgcggtcccgcagctgcacgtggtaccgttcacaggggcggccgcagttcttatagctggagccgtccgacaggaaggtgcagaacacgcagtgctccatgtggaacatgggcatgtgctggtgcagagtcagttcaaaccattccggcggcgcggcgcggagcaggtcctccacctgtccggcgttcaggtcataggaaatggtgagataatccaggttcccctgttccttcaggatggccgcgctgtacggattggcgacattcagggaaaaatccccgatgcggtgcaggggggaatggcggaagtactgcgccgcgcccaggttgcggatgaggacgccgtccggctccgcccgttccatgagcttgaagtaaccggtttccgacggcttctggatgcggggcgtcgccagaaagacggggatgcttttcgtgtgccgccggaccgcttccactcccgccgcatagtcccggaggtcttcaaaatccagatagacggcgtccgccccggcatccagaacggaaggtatctgttccggcctgcggcacagcacggacaggtgcggcggcgcgtccggagttgccgcacccgccggaagcgcgggaaggacgaaaggttccggaagacgggtgggaacggaggcttccctctcctgccggaccgtttgaatttgttccacgagggcgcgccttgtctggttgaggatgctgagcgggagcatcaggccctccggcaggcggcattcgcaggaagccaggcggaaccccgttcctcccagcctgccgagctgctgttccagaacttcaggagtcagcgggcgtttttccgccgtttgcaggggctgtgtggactgcacggaacacccgtattccgggcaggaaaccgtcagaggctccccggcggatccggtgcatgccaaatggaggggaaggacggcctccggcaggtgctcccgcatttttttcagctcggcgttcagggccggatcatccgttttccagagcttctgccccggcctgaccttgctccagtcaatgccggaggcttttccgtggaagaaaaggcggtttctctgcactttccagatgcggccgccctgttcttcattgcggtcctccccggcgtcaatgacgaagccgtcgccgggagcgagcggaacgttcccttccggcctgatgtccagccagccctggctgctgtccacaatggtgcctgcataggcgccgcgcttcttgccgtggcggccgtgggtcaggcgcgggtggtccgtgccgtccagccagccggtggaaaagccgcgtgaaaataccatttgcagtgcataacggtcgcgtgcggtcaccaattcatccacgggtattccggcgcaggcggcgtccagggcctttctgtaggccgccgttaccgccgcaacgtattccgggcttttcagccgcccctctatcttgtagctcttcacgcccatgcggaccaggtccggaatgcggtcaagggcgcacagatcctgcgggctgagcagatagcgcctttctcccagcggaacggccttgccgtccacgaccagggtatagggcaggcggcaggcctgcgcgcattctccgcggttggcgctgcgctggcccaggctttccgacgtgaggcactggccggagtaagccacgcagagcgccccgtgcacaaacacctccaggggaatatccgtatggcgtatgcattgcccgatttcctccaggctcaattcccgcgccagcacggcctgcttcaggtccaggaaaccggcggcgaattccaggccgtccggggaggaaagcgtcatctgggtggaggcgtgcagctccagcttcatggcgggatcctgccttccccactctgtcaggcagcgggcaagcccgatatcctgcacgatcacgccgtccacgccggcggcattcaaatggcccaggtaggtgagggcgtccgccagctcggaggtgaaaaggagcgtgttcatcgtcacgtaccccctcacgccgtgcgcgtggaggaagcgcatcagttccggcagggaatccagcgtaaaattattcgcgcgcaagcgggcgttgaaacggtccaggccaaaataaatggcgtctgcgccattggttacggcggcgcgggcgcagtccatgtccccggcgggagccagcaattcggggcgcaggtctccgggccggagagaggaaagggtcatgtcgtcggaaatcacggggaaaaacaaaaaggatggaggggttactgggcggtgctgcgtttttccgcatggcggagcaacgctttcaaatcccccagaaggaacagggagcctgccgccagagccggaagcggggaggccagggccgcatgcagcccgtccggaagggtggaatggataaagacggggccggtttccagtccggccagcaggacggccaattcttccgccggcatgatgcggggggaagtgcagggaaccaggtgccattctccggtgatttcccgcaaaacggggatcatctcccggatgtgcttgtctgcggatgcggcaaaaaccagagccgccttccgcccggggaattcctccttccatgtggccgcgagcacgcgcgccgcatgttcgttatgggcgccgtccagcaccagcggtggcgtttcaaggcgttcaaaccttccgggccactgcacctttgccagggcagcggcggctgcggaaggggaggggagggcgtggagctgcctcatggtttccagcgccagggcggcattttcccgctgatgggctccggacagggatggccggggcgtttccccgtccgcccgggcgaccgtaaggggggaacggcggtcccgtgccgtccgttcaatgacggccatggcttccgggctctgcacggcggtcacggccggtttgccgggggagatgatggccgccttttccgcggcgatctcttccagggtgtctcccaggtactgctggtggtccaggccgatgggggccagcacggcgatgtccttgggcacggcgttggtggcgtccagcctgccgcccaggcccgtttccagaatgatgaagttcacgccgcttttgcggaagtggcgcagggcgacggcaagcgccagctcaaaaaaggtgggcggctgttcccagccttccgccagttgtttcaggaagaagatttcttccgccagcgcctccgggggaatcatattcccgttcacgcggatgcgttcggaaaactccaccagatggggggaggtgaacaggccggtcacatacccctgtgccctggccagggcctcaatcatggcgcaggtggagcctttcccgttggtgccagccacgtggaccactgtggcatccgtccggtccgcatcggctgccgccagcagcttcccggtattgtcaagccccagcttgatcccgaagaattgggtggaaaaaagccagtcaagggcggcggacacgttcatgggcggtattctaccacgggaaggctcccgttcaatcccggtatgggagggggcgtcaataaaataccgccgggaacggacgcggcaaacacgaacaagctaccgttgctacctctcggtcctggcggggtttgccagtcgtgcctccacggggttcccggcggcccagacagtaaactaggtttgcggtgcagtgtcaaccttcaaaggcatcatctccttctggtaaaggagagcaaaatggagatcagcagaaccacgccgatgacggcggcggccgtgaagaaaatctcttcctcctgcctgagctggctgcgctccccttcaattttcccgtccctgatgcgctgcagcccgtgcaggaccttggcctgctcctccacgtccgcctccgtccgcatgacaagcgtttcctcatggctgacggcctggtcgtaaggggagatcatggtgcggaactcggggtcttccgaaaggatttccgtctcatcatactcttccgccaggggggagttcatggaatcccggagactggcgatctgtctgtccaccttgttctggaacagggccagctcccttttggccttttcgtaggccgccgtctggtcactcagcatggcttctcccttgcgggtgatgcggtccagctcctgcggcaggctggcctggagcttgagcaggtccgcccggctctccgtcaccttgaaatccttgctcttcgtattggacgcctccgcgcgctggatgcggttgatgtccagccgggtttccacctggcgtatttgttcctggagccggttccgggcgttgtccaactgctgcctggtggtgtcccgcttgcctttgagctcctccacgtccgcgacgcggcggtcatattgttccaggagattggctatccgggcttccgcgctccgggcattgggccttcccttcacggcgggcacggactttttcccggcgtttgcctggtcgatcttctccatctgggcatcccaatacttgcggatggcctcttccttcctctggatggccgcctggaggcgtgccgcctgctgttcgtgaagttccgccgcctcgtcaaaacgggcctgggccgcatccagctccggataaggctcctgctccatggctttgatggcttcatgcctgggcacgaggccggtttggtaataatcccagccgtaatagccgccggcgagcaacaggataagaagaaggtaacgcataaattgaaggtggttagaggcagaagtttatctcatagtggaagttccgccggattttgcaaaccttaaaatcagccatccggagcttttttcctccgggacgggaatgatgataaatccgcggcacgggaggcgtaatcttccttgaagccatactttcaaatcatgtctattttttcatcacgcagacaatttctcaaatccctggggctcgcggccggagcggctgccgccggaaacgttctccccgggcaggccctggaaatccctgccggggacagcctctggaaatccggcgcccaggcgtctccgcggccttccggctccatgtacatggggggcttcaaggctcccgggctggcccgcatcaggcttgccttcatcggcgtgggcggccgcggcttttcccatctggctcaaatgtgcgtgatggacggggtggaaatcgtgggcgtatgtgatttgaaggaagacctggccaagcgcggcgtggaccgcgtgctttccaagatggggaaaagcccgctgagttattccggcggggacacggaatacctgaccatgctgaaggagctgaaaccggacgctgtcatcatcagcacggactggagtacccatgccggaatcgcctgcgacagcatgaagcacggcgcgcacgcctttgtggaagttccgctggccgtctccctggaagaactctggaatctggtggacaccagcgaggccacccggaagcactgcatgatgatggaaaacgtcaactacggccgggacgagcttatgttcctgaacatggtccggcagggggtcatcggcgatctgctccacggggaggccgcatatatccactgcctggtgacgcagttgggggacacgcgcggggaaggggcctggcggcctgaataccatacccggatcaacggaaacctgtaccccacccatggactgggccccgtggcacagtacatgaacctggcgcgcggagaagaccatttcagccgggtggctgcgttcgcctcccctgcgctcgggcgcaatgcctacgccaaaaaacaccttcccgcggaccaccgctggaacaatacccccttcatctgcggggacatgaacacggccatcgtcaagacgcaactggggcgcactattgtcgtccaactggatgaaacgtccccccggccctattcccgcgccaacctgatccagggaaccgaaggaaccctggccggctttccgacccgggtggcgggtgaaaagctgggcaacggcaactatcacgaatggattgaaggccgggagaagctggccgccatttacgagaaatacgaccatccgctctggaaacgcatcgggaatctggctacgaaaatgggcggccacggcggcatggacttcgtgatgctttcccgcatcgtggaatgcctccggaacggagagccgatggaccagaatgtttacgaaggagccgcctggtcttccctgctgccgttgacggctcattccatcgcgcagggcggcatgcccgtggagttcccggactttacccgcggagactggaaaaccaccgcgccgctggccgtggtttcctgagaaggaaaatagcagaagatgctggaaaagcagatgtacagtgtttgactcgcagccatcatggaaatgaagcctgcgagtcgcattcctgaaaaaaactacggcttatcagaaaatacaggctctatatttaacaggccagcgcgcggagtcattccagtaaaaaatccctcactatggaaatagcgagggattaaaatgaaaaccggggccagacggcatttatcttattttccggttttttccgtcgtcccccgttccagtttttccatgagttccttttcactcatgggttggtgattattcttcaattcctttattttctcgcgcgtctgcctgtcttttgatttgcctaatttcttatacgcatcagtcatgtcgaaatagaccagcttaagattgtttaccttgttttcgtcttcatcattcgtcaagctgacggtaaggatgtagcggcctccaatcatggtgaatccttcacccagaacacggtaaccgtcgtaatgttttctgaggtattcatctcgcgccgattccagcatgctgtaatccttgacccctttaagatcaagcacggcgggatttttataggaaccggcaggaaactggacggccccggcggcctgtttttgtgcttcgtccgctccaaatgatgggttgatggccagcatggcgctgcatcctatggtcaaaatggttatttttaataatattttcatcttcattgccctatgttattgttaatatgtatggttattgtgttgccgccattatttgctgcatccgttgtctctgcataattccattcttctggaaagggctttttggtgtaaaagaagaatcgccttttcttttgctctctcattccagggcaggtcttccgagacatccacgacaacagtggcaccctgatccagattcacgatctctgaaacagtggagccgtccttgtgagtgtaagttgccatggcagtcgcatgaaccttgaatttcattgattttcccttaaccggttcaaccagctctgctgtcggctctgaaatatttatgagctcatagccgcattttgcttgtttggcatgtgccgctccaacgaggatgcccaaaacaagcgaaaaacagcacaatatttttggaaccatcatcatattatcacctatgaaattgaaatgataaattgtcaatgaaaattgataatcccggtagatgttttgccgttattccatcgtaaaggaattgggtggtaaaaatatttttctaattcataataaataaattataagctttactgttagataaggcattcctggaagctcgcgaatcagtttccccggtgcaactttgcatggctaatatgggtgagacacaatggacgcggaatgcacggtgaaagatttcgtcatgggattgttccaaggctgccgcaaacaggtggaatgccgtgatggtgtacgcccctgtttttatgatttccggcaaattctccggcatgggcggccggatgccaaaaacagggctcatcaagaaaaccggattttctgactttccctcgtcagagaggaaaaaatgcgtattaatgcatttttctgttccctttctcatctccccgttgaattgattttcatcaaccgctccttcaggagatgaaattggttcagctcttgcaaagaacgtccttaagttcttctgcgctcatgttcatgagccactgttccggaccgccggagaacaggtcgtccgccatgcggcgcttttccgtcagcatggcgtcaatgcggtcctcaatggtgccgcggcagatcaggcggtgcaccagcacgttccggtgctggccgatgcggtaggcccggtccgtcgcctggttttccacggcggggttccaccagcggtccacatggatgacgtgggaggcctgggtcagagtcagtccggtcccggcggccttcagggacaggatgcagaagggaggcccggattccttctggaaggcggtgacgatgccctggcgttccggaatgggcgtgcctccgtgcagggtaagcccggaacggccgaagaccccggaaagcaagtcgtgcagatggggaatgatggaacggaactgcgtgaagaggatggctttttcctgccgggcggcgatggaggcgcacaattcctgaagacgcaggaactttccggagcgttccggggcgtagtcgtccgtgccctggaactgcgccggatggttgcagatttgcttgaggcgcgccaggacgggcaggatcagcatgaggcgggcggccgggtccggttcgtccagcatggcgtgcagcgtatctatctgcgtctggtacagggcggcctgttccggcgtgagggggcagtaggcgggtatttccgtcttgtccggcaggtcggggaccagggctggatccgtcttcatcctgcgcaggatgaaagggcgcaccaggcggcgcagcggggcatagcctcgttccagggagcgggtgaaggcttcaaagctttttctgccgccaagcaggcccggattcaggaattccatcaggctccataattcattcaggttgttttccaccggcgtgccggacagggcggcgcgcctctccccgtgcagggagcggatggcgcgggaacgtgcggaacctgcgtttttaatggcctgggcttcatccagaatgatggccgggaaatgcagcccggccagcgcaggcgcgcgcgcggccatgccgtaggtagtaatgacggcgtggcagccttcccggcgcggtatttcctccggctgccatgaatccggggcggaggggtgcatgatgcgcagggcgagctccggcgcgaagcgttccgcttcctccttccagttggacaggagggacgccggggccacgatcagggccgggaggccttccagccggccttccctccgcagcgcatccagccatgcgatgacctgaagggttttccccagccccatgtcgtccgccaggcaggcgccgaagccccgttccgtaacccggtacaggaaggaaaagccctctttctggtaagggcgcatcagtgcgttcaaccggggcgcaagctccggcacggagacggaaacctcccccgccaggatatccagggcctgccggagatcccggcccggttccaccacgcagtcttcatccggttccgggagttgcgcaagctggtcggaagggccgttgaccagcagcctcagcccctgaaccaggggaatgcccagggaactcatcatgcgcgccgccttggtccaccggtccatcaggtcccggactttttgagcgtccacgcgcacccattcccccttgaagcgtatcaggccgtctccgttgctgagcagttcctccagttcctccggggccaggtccctgcctcccagcgtggcggctacggaaaaccgcagcaggctgtggacggaaagcccggaggaatgagccgttttttcactgccgggagcgtccgccgtgacttttacctgtaatttgggaggggattttctccacaggttcaccatgcgcacgatgatgcctgcatgttcataggctggcgtgtcctgtaaaaagtcccgggcttccgcagcgctccaggccagcggggcgtaaatctttccattgtccagcagtcgctgcagcagggagctttcccgtgccgcttccttcaagggctggagcacggccagcagggcagtgtagttcccttcatgaagtttcagggcggtggaaaggggaaggtggcgcacctggttgtccgccgcgctttgatgcgcaaaggtagccatgaaggcaaagggccgggagcccgtggcgtcatcccggttttccgcaaggtggaagaataccttcccaatctggttccagggggcgcccagcccgttcagccacgcggcgggagtgatgccgcgggcgccgacttcctttttcaccagcctccggaaatcctcaagccatccggcgatgacgcctggagtgacgtattccgcccccggcacgggagggaactgttccgccagggccgctctttccgccgtggaggccagcaggtggtccaggacggtgtccacctcatccggcctttccgcggcggcgtgcgccatgcgggtgagcgcctggcgcgccatgttcttgataaaaaaggcgcccgggtcaggcgcggtttcccagttggagaccgcgagggcatataatccgtttccggccccctcttcaaacaggcggtcgaaggggggcgtgtccgtcaccggcgctccggatggaaggatgcggaaaccgctgaagttccgttcctcttccggcgctgcgtgatgggattccggctgcatggctggaaggaatgtagcatggccgcccagcttgttcaatccatcccgccgccctgcggcatgcggttcccgtgccgcttacagggcgaacgtcgtatctttgatgatgggcagtttgggcggcggcggattgaaaagctccttgatttgtttcagatattcgatcagggctgaacggacgcttattcccgtcggtttgccgtttcccttttgagggaatttgaaattgttgcacaggtagtcgcccatcgcgacagtgtaaatgacgccgtttttcaaggtgctggtgatgcttggcgtaacgccgtccataatctggtaggaaaagccggagcagtaaacttccagaatgcctccttcgtcatcggacggggacatgaatttggacagaatcagttgttcaatgtccgccttgctcatggagcaggtgacgaccttttcccggaagggctccatttcataaatatccttgatcttgatggggcccttgcagagatggcttctggcccgtacgccgccgcggttgtaaatggcaatgtccgaatgggaggcctgctggatggctttgcagaaaaaggtgcctacggtgacgtgcgtgatatcctccccggcgacgcccacctgctggttgaagaacgggtttccggtgaactgctggacaatcttctctacttccgggtcgctgggaatcctttcgtccagggaaacggccttcgtggacttggaaaggatggaggcgggtttttccgtggagaaggtgatttccgtaacgcctgcatggctcagtctgtggcccgtgtggctgagcagcgttccggttctgagatggccgtgcggaagcatcacatgagtatggccacccagaatgacgtcgatattcggagaatacttcatcattttcagatcgtggtcgtatcccaggtggctgaggatgacattgatggtgttatggtgcaggcggaacctgtccgtgatgcccttgtaatcctcttcatccggcagtttccatgaaatgccgctcatcctgcggacgtccgtggtctgtaggtccaccaggccgatgaaccctatggaaatcggcgtgcccttgatggggatgctggcatacggggaaaaacaattttccagcgtgggggagggattgacgttggtaacgacaaacttggtgccgggcatccccttaatgtggtcccgcagggcttcctgcccgtaatccaggtcatggttcccgatggtcacgatgtcgtacttaagcttgttcatcaggacagtcaggggttcgccccgtttttcccagtcgtccacataggggttgcccatgaaataatctccggaatccaccagcagcacgtgcgggtatttggcgcggtactgttttaccagcgtggccagtttggggaatttttccagattgccgtgcatatcgctggtggaaatgatgatcagcgttttgtggggatccgatttgagcttctgagccagggtgaacgggcacaggcatgccaggccggcaaggagaatgcggggcggaatcatggatggagaaagtagagatacgggaaatgataaaagggattaacgggcgaaaacctcgtacgggccgtcacccactgaaatgacttccagacggaccttggatacgccgcggctgtgcaggccgatgcggcttgcggcggacgcggtcaggtctatcaggcggttgctgtgaaaggggcctcggttgttgatcctgacgacggctgatttgcccgtggccaggcaggtgactttcaccttgcacggcatcggcagggttttgtgggccgccgtcatggaccgctggggattgatgtactctccggaggatgtcttcatgctgcgtcctttcccgccataccaggaggcatagccggtttcactgtattgcagggcgtctgcgacgctcatgggagtatatcttttccccctcacccggtagggcgcattttttacatgcgcctctgtcgcctgtacggccggggccgttttctggccgcacttctccgtagtggaacagcccggcatcagaaaaagcagcaggacggggagggaccaattcacgctttttatctttaacacatgtttataatcttgtataacaaaaaagaaacaggaattgaaatttaatggatagggatgcccggaaggaatctttccccctgccgtggtttaccagttgagcggcgcgggaaaatgcagtatgcttgcccgcatgaatccttccaaggtaatcggcctggtcgcgttggcggaaaaaccgggactgggggaagcgctgcgcatcatgcgccgcgagctttcccgccacgggctggggtcctgcgtcattgagacgccggatgccctggaacaggccattgtccggtgtagcatgctggtaaccttcggcggggacggcaccatgctgaccgtctcctctctggcggctgcgcaccacgtgcccctggcgggcgtgaacctgggacgcctgggattcatgaccacctgttccgtacaggagctgccgctgctggcgtacgccctccaggagggttccttcctgacggacgagcgctccatgctggaggtggtccggatgggcgtggacggtgtcgcagtccctccccgcaagctggcgctgaatgaagtctccctcatccgcgcccagtccggcaagatggtggacctggatgccgagatagacggagaactgctgaaccgctaccatgcggacggcgttctggtctccacccccaccggctccacggcgtactccctttccgccggagggccgctggtatggcccatgtcccgcgtggtgtgcgtcacccccatctgcccgcacagcctgaccaaccgttccgtggtgcttccggacaccatgaccatacgcctgcggccccgcgagcgccgcggccgctttgattccatggtttattccctggacggccgttccgcctatcccattgaagtgggagaaagcctcgtgatccggaaagctccggaaaccctctccctggttcatctccgcaaacagaacttcggcgctctcttgagggccaagctgcgctggcagggagcggagattcctacggatgatgaataaaaccgttccggcggttcggaaaccgggcccggtgtcttttgcaggccggggcgcttctccattgatcgttccacattggcgcaggggcggtaaaacgatttttttaggatgcgggcttgacgaaaaggcctatcctataatactcttcctgccctaccaccaagggggtggtagatcttaatcgcataaacgcgtaagaaatagtcatatatgaagacccacgtgaaaaaaggtgatgaagtagaaatcatcgccggacgtaaccacaagggcaagcgcggcaccgttctcgccgtgaatgcttccaaaggtactgtcatcgtagaaggcgtccgcaccctgaaaaaggctgtgcgcccgacggaacagaacccggaaggcggcattcaggagattaacggcccgattcacatctccaacgtgaaaaaagtaggctaggcctccggcctgaccctgcgcttaagccacataaatcattaataaagagctgacccgctaaaacaatgagtacaccaacactgcaaacatactaccgtgaaaaggtcgttcccggccttcaagcgaagcatgcatacaagaacgtgcatcagattccccgcctggagaagatcgttgtcacctcctgcatgggcaagcacccggaccgcaaacaggccgtggaagatgccgtcaatgaaatcgctaaaattaccggacaaaagccgtccgtcaccttcgcccgcaagagcgtggccaacttcaaggtgcgtgaaggcgaacctctgggagcccgcgtaacgctgcgcggcacccgcatgtgggaattcctggaccgcttcatcaacgtgacggctccgaacatccgcgacttccgcggccttccctacaagtcctttgacggcaacgggaactatgccatcggtatctccgaccagtccatcttccccgaaatcgaacttgaccagatcaagcgtcagatcggcttcgacatcattttcgtgacttccgctcctacggacgatgaaggccgcgacctgcttcgcggtctgggcgttcccatgcgtgaaccgaagaaggccgaagaaactcaaaccgctaacgcctaactatttcttaccatggccgtattaagtgaccccatttccgacttcctcacccgcctgaaaaacgccagcctggccggcaacgaggaatttaccgctccctgctccaacatcaaggtggaaatcgcccggattctgcaggaagaaggctacatctggaactatgaagtgaccggtgaaggaaccaagaagcaaatcaaggtgaagaccaaatttaccccccagggcaagccggtcgtcaccgacgtgaagcgcagctccaagccgggccgccgccagtacgtttcttccgaggacattccccgcgttctcagtgggcttggcattgccatcgtctccacctcccgtggtgtgatgaccggtgcgcaggcgcgcaagcagagcatcggcggcgaacttctcgcccttgtatggtaaccattaacatttcctaaacatatgtcccgagttggtaaaaaatccatcacattgccggacaaggtaacggtaaaggttaacggctcttccgttcaggtggaaggccccaaaggcaagctttcctggacgcttccggaaggcatcaccgcctccgttgaaggcaatcagctttccgttgaccgcgctggcgaaagccgccagcttcgcgccctgcacggcacgaaccgttccctgttgaacaacatggtcatcggcgtttccgaaggcttcgtcaaaaaccttgaaatcgtcggcgtcggtttccgcgccgccgtgaagggcaacatcctggacctgaacctgggcaagtcccatccgatcaaccaggtaattcccgaaggcctcaaggtgaccgtgaccgaaaacacgaaagtgacggtcgaaggcatcgacaagcaggtcgtaggccagtttgccgctgaagtccgtgcgtactatcccccggaaccctacaagggcaagggcgtgcgcttcgccggtgaagttatccgccgcaaggaaggcaagagcgtcggtaagtaattcaggtaataactattacaacatatttatacacgatgagtactatcaatcgcaaagccatccgcgccaaggttcgccgccgcatccgcagaaagctctccggaacggcttcccgcccccgcctggctgtctatttctccaaccgtcacgtctatgcccagatcatcgacgacacggtgggcaagaccatctgctccgcttccacggccgatgcctccatcgccgatccttccaagctcgccaaccgcgcctctgccaccaaggtaggcaacctgattggtgaacgtgcgaaggccgccaatgtcactgaagtcgtcttcgaccgcggtggcttcaagttctgcggcaaggtgaaggccctggccgatgccgcccgcgaaactggtttgaaattctaattgaaagattccctaaatgaataacgaaacggaaaacactgctcctgctacggaagccgccgctcccgctcaagcgcagcaacccgcacagggcggccgcgacttccgcggtccccgcggaccccgccgtgacggccagaatggccgcggaccccgtggtccccgccgtgacggacgccgtggcccccaggctgaagctcccgtggaagaaggcccccagctcgctgaaaaggttgtgttcatcaaccgttgcgccaaggtcgtcaagggcggccgccgcttctccttctccgccctcgtcgtgagcggcgacatggaaggccgcgtaggcttcggcttcggcaaggccaatgaagtggcagacgccatccgcaaggctacggaagccgccaagcgccagcttcgcccggtctccatcgccaacggcacgattccgcatgaagtctactccggattcggcggcggcaaggtgctcctgaagcccgcctcccccggtaccggcctcattgccggcaacaccatccgtgccgtgctggaagcagccggcgtgcgtgacatcgttgccaaatccctcggttcctccaaccatgccaacgtggtgaaggctaccctgcaggctctcgcttccctgcgcacgagcgaccaggttcttgccgaccgcggcaagaagaaggaaaaggccatctaatctgaccaggaggcggtcgccccgtgccgccgcctccacgaaatccaaccattgtaaataacatgttacagcttcatacgattaagcccaatccgggagccaagcaccgcaggaagcgcctcggcaacggggaaagctccggtctcggcaagacctgcggcaaaggcaacaagggccagaaggcccgttccggcggctccatccgcccgggatttgaaggcggccagatgccccttcaccgccgtctgcccaagaaggggttcaacaacacccgcttccaggacaaaatcctcatcgtcaacctctcccagctcgaacgcgtgtttgaagccggcgctacggttgatgaaaacaccctgcgtgcagccaagctcgttcaaggtccctgtgacgccgtgaaacttctcggcaacggcaccctgaccaaaagcctgaacgtagtcgtggacttcgtgagcgccagcgcccgcgaaaaggtgactcaggccggtggcaccgtcaccgtgctcagcgaagcctaatcacatttggcgaaccgggtcatgcagcttgacccggttcgcatcattgtgtttactgttgcggtccccatggatgccccgggtacaagccgccgtgacatgcaagccaagctgcgcgacaacttctatattacaggaccatgatatccgcatttgcaaactccatgaaagtaccggagctcaggcaccggattttgttcacactggcgatgatcgtcgtcgtccgcctgggggtacagatacccctgccgggcattgacgtcatggagctgcagaaagtgattgaagcctccgcgaatgccagcggccccggcgcgggcctggctaccgtgctgaccatcttttccggcggcggcctgcagcagtgcggcatttttgcgctgggcatcatgccctacatctccgcttccatcatgacccagctcctttccgcggtggttccccagtgggccaagatggtgcgggaagagggaggccgccagaagatgaccaaatggacgcgcgccattgccatcgtcatcgccattgtgcagggctggttcctggtcggtacattggaacatccggaccgtttgaaagccgtgggcctcaacatccctccggactgccagctcgtcattgacccaggcatgcagtttgccctgatgacggtgctcatcatggtggcgggcaccatgttcctgatgtggataggcgaccagattacggagcgcggcgtcggcaacggcgtctccctcattatttccgtcaacattatccatgcccttccgggcgcggtgaccctggcctggaaaacgctggtgtacaaggacggcgcggttgtcccgatgggcgccatgctgctcgtggccctgatcgccttcctgattatcgtggtggcgctcgtcgtcacggtaacgcaggcccagcggcgcatacccgtgcaatacgccaaacgggtcatgggcaataaaatgttcaacggcgccactcagtacctgccgctcaagctcaactactccggcgtgatgcccgtcatcttcgccacggccatcctgtcccttccgcaggtgctcttctcccagatcgcccactacaacaccacgctgcagtggatcgccaccaagatgaatgactggatgaaccccgcttcctccggctactacatcatttccggcctcatgatcttcttcttctcctacttctgggtggctaccatgttccagccctcccagatcgcggaagacctgaagcgcaacggcggctacatccccggcatccgccccggacctcccaccgcccttttcctggaccagaccatgcagaggctgacctttgccggttccgcattcctgaccctcatctacttcctgccttccctgctgaacatcgggggcagcatcccctacctggtcacccaattcttcgggggcaccagccttctgattctggtcggcgtgctgcttgacatgatgcgccaggtggaaaccactcttctctcccgcaactacgatggcttcctgaaaaaaggcaagctcaagggcaaatacggtcacatccagggtaccggagccgccgcaggcagccgcacggtcaccgtcatgtgggtcgtcatcgccctgctggtgctggctggtgccatcgcctacaatgccatgcagtaaggaacgccattccctcttccgaaagtaaagacatgaaggatctcaagcatttcatcctggttgggcctcccgcatccggcaaaggaacccagggccggtttctggctgatactttcaacctgaactccctgagcaccggctccctgctgcggcgggaagtggaatcctgcacggagctgggacggaaagccctgggctatatggacaaggccatgctggttccggacgagatcgtcaacgacatggtgcgcggctggctttcggaaatggacaatgacgcatggctgctggacggctatccccgcacggttgcgcaggcggaagccctggaccatttcctgacccagcgcggaacctccgtggacgtggtcgtctggatggacgtagcccgggaactcattgaacagcgcatcatgcaccgccgggaatgctccacgtgcggccatgtggtgcagacatcggaagaggaatgctccaaatgcggaggcaaaatggtctcccgcaaggatgacaacatggaggccttcgcccgccgctggaaagactttgaagccatgacgctgcccgtagccaggtactacgaagcccgcggcctggtggttaaaatgacggtaaccgaggaacgggaacctgccgaggtttcccgcgacctggcccgcaagctggaagaataccggcaatagaaagacgaattccatggcagaacgaatccacatcaagtctcccggcgaggttgccaaaatgcaaaaggccggagctgtaacggcggaaatcttgatggagatcggagccgaggtccaggcgggccgcaccacgcgggaaatagacgacatcgcgcgtgaaatcttcaagaagcacaaggtaggcaactccttctaccagtaccgcgggttccccggccagctctgcatttccatcaatgaggaagtggtgcacggcagcggcggtccgcgccgcatccagaacggggacatcgtgagcctggacgtgggtgccattgtggacggctggcatggagacaacgccatgaccgtgcccgtgggcatggtggacccggaaaagctgcgcctgctggccgtgacggaggaatccctgttccgtgccattgaactggtgaggcccggcgcgctgctggcggacgtctgcgcggctgtggagggctttgtgcgtccccgcgggtacaccgtggtcagggactttgtaggccatggcataggccgccatctgcatgaagagccccaggttcccaactaccgcccccattacaagcttccgcgcctgaaaaagggcatggcgctggctatcgaaccgatggtgaacgccggcaggccttccgtcaagattctggatgacggctggacggtcgtcacggcggacggcaagccatccgcccactttgaacacacggtcatcgtgacggacggggctcccctgattgtgacggagcgcccccgcatcgcgttgccggagcagctcggcatcgcccctttgtaactccagccccgcaagggaatgacgccgccggacgcccagattcccgctcccgtaattctggagaggacggccacgcaccggatggtgtgggtggatgtggcccgtgtgattgcctgcatcctgattattgcaaaccacatggccttctattcggcggagctctaccggtggatatgggcggaatttctggcggcgcgcactccctttttcctgctggcggcgggttactttgtggggcgcggttcgttcggtccgctggacggggggagctttttcctgtggaagcggagctggtttcttctccgcccgtacctggtgtgggggctggcggcggccgttctgatcggctggtccccccttcatgaatactacgcctcctaccagcccatgtatgcatggctgaagggggaggcgggcagcggcttctggtccgccctcgcggcgttcggccgctgcctgggcattgccgggcacccggtggacgcccccatgtggtttctgcgcgacatcatcatttataccgctgtagcgcccctcctgtaccgcatggggaactacatgctctgggtgggaatcatcatgctctccctgaactactttgcgctggacctggcggatcatgactatcctatcgccaacagcctgggctttttcctggtggggatgtacgtatcccgttactcccttccgttcctgacggaatccgtgcgacggtatgcggtgccgttcctgcttgccacgctcgcgctcacttggtggctggtgggccaccgggaccagcacaactccatgcttattgcgctgggaatgctggggctgatgtccctggccattctgttcacggaatggtttccgcgcgcggccagatgggtggcggggctggccccggcgtgcttcttcatcttcggcacgcactacatcgtcatcatcctgctgcgtgaaagcggctggattacgtggaagggggaggcctgggacgtcctgtggctctgcctggttccggtcatcttcgccgtgctggcggggctcttcttctgcatgaaaaggtttgccccgcgcctggttcccctgctgggagcctacgggaaatagccgccctgcagggccgttcctccggaccggaaaaggagccgcgcttatctcttgccgtcaaaaggcaaattccttattctgccccttgctggaacgggcggggatggcgcttttgtcacgccgccattcttgctccacggctgggaaacaatacatggtatggcaatgattcaaggcgagcaggttcaggattcggaattatcaacgcaggcggtgatctacctggggccgagctccatgagcctgatggtggctgaggtggttcaggacaggattcgcctgctggacttcctccagcagcccgtgcccatggcgcgggacatcttccgtttccaccgcatttcccggcataccatggaccgttgcgtgcaaatcatcggagactatctggaaattctcaaggaatacggaaccggcagcaggctttccgtccggctcatgatctccaacatcatttccgaggcggacaatgtggacgtgttcgtcaaccgcatgcacgtggcccacggcctgcggggacgccggattgacgacggcaagatgacgcgcctcatttacgtgaaggtgcaggaaacgctggcgcaatacccgggattcagcaagaaaaaggtgctcgtggtccatacggggccgggcaatacccgcgtgctcctgttccaaaaggggcgcatcgtgcgctattcctgctaccggctggggacgcaccgcacgggcgaggccgtcggagaaatagaatacggggacgatgtggcggaactttccctgctacgggagcacatgcgcgggcaggtggaccagatttgcctggattacggcggcgtcaagggcctcgctgggctcatcgtcatcggccaggagatgcagcagctccgtgaccgcctggaccccacgccggaaggcaaggtggcgtgttccgccttggtggcggaagcggaacggatgtcccgcaccaccctggagcagcgcatgaacgtttacggggcggactttgccggggtggattcccttctgcccgccgtgctgatgacggagatgattgcccgcagcctgaacctgaatgacgtgatcatccccggaagcggctatgacgaggaattctcaagcagcctgatccgggcggaacagcatccgggggacctggaggcggaggtgctccacttcgccgggattctggcggacaggtacaaggcggacaaggggcaccgcgagcatgtggcgcgcctgtgcatggaaatgtttgaccagctccaggacctgcaccgcctttccgagcacgaccggctgctgctggaggtggcctccatcctgcatgaggtggggtctttcatcagccagcaggaccaccagctccattcccagtacatcatcctgaacagtgaaatcttcggcctttcccgggacgacgtggaaacgatcgccctgttggcccgctaccatcggcatgaggtgcccgccaattccgaccccatgtacggggagctggagctgacggaccgcatgcgcgtagccaagatggctgccatcctgcgcgtggcggacgccctggaacgcggccatgcccagcgcgtgaacggcgtccgggcgcgcatccggggccggatgctggagctggagctccagggcgtgcgtgaaaccgccgtggaagacctggcgctgcggctgaagggcgacctgtttgcggacatcttcggttatgacgtcgtgctggtgccccagcggtaggctgattcaagaaacttccatcccttattttctccatgtctaacgaatacatcaacagagagctctcctggctggaattcaaccagcgcgtgctggaccaggccgtgagaacggaccttcccctgctggaacgcctgaagttcctggctattaccgcctccaacctggacgagttcttcatggtgcgcgtgggcggcctccagatgctgcggcattccggctcccgcgtgaaggacatttccgggctgaccccaacccgccagctcaaggacatccgcacccgcgtgggccgcatgattgaggaccagtaccgcctgtttcatgaagaaatcctgccgtggatggaaatcaacggcatcaatccgctggccatggaggacctcagcacttcccagaagctgacgctggagcaatacttcaacaaccagatattcccgctgctgacgccgctggacatggatgcgccggaggctcccgcgctgccgtccctcaagctgctgatgggcgtggaactgcgggacaatgaaaccggggaggtccgcgccagcgtggtggccctgccggacggcctgccgcggcgcgtgcccgtcccttccgcggaaacggaacgctacgtgatgctggaggacctggtccgggaatgcatcggcaccgttttccccggtgaaaccgttctctccgccgcggtattccgcgtcacgcgcaatggggacattgccgtgcaggaggaggacgccctggacctggcggatgaaatggaggaagtgctggtggcccgcaaattctccgaatgcgtgaggctggaaatagaatcctccgctcccgtccccctgcatgacaggatcatgcagatcgtcggcgcggggaaggaggaaacgtatgacctcaagggccccctgatgctttccgacttcatggaaatggcctttgcccccggcaatgaccaattgaaagtggagcaatggtccccgcagccgtcaccctccgtggaccctgccgtcagcatctttgaaaacatcgccaacggagacatcctgctcaaccatccctatgaaagctttgaacccgtcctgcgcctggtggaggaagccgcggaagacccggacgtcatcgccatcaagcaggtcctgtaccggaccgccaaaaactcccgcatcgtagccgccttgaaaaaggcggcggaaagcggcaagcaagtgacggcgctggtggaactgaaagcccggtttgacgaagcccgcaacctggaaaaggcggaggaactgcagcgttccggcgtgcaggtggtctacggcgtcaagggcctgaaaacccatgccaagatatgcctggtggtgcgccgggagcagggcatgctgcggcgttactgccacttcggcacggggaactacaatgaaacaaccgccaagatttacacggacatctcctacctcacctgtgacgaccaattgggggcggatgcctcccagttcttcaactccgtaacgggacgcaccaagctcatgcgcttccgcaagctgtacccctcgccggtgctgatgaaggctcgcctcattgaactcattgaaggggaggcggagcgcgcacggcagggggaaccggcccgcatctccgccaagatgaacagccttcaggatgtggaaatcattgacgccctgtacagggccgcggacgccggggtggacattgaactgaacgtgcgcggcatctgctgcctgaaaacgggcccccggcccaacggcaaggtgatccgcgtggtcagcattgtggaccgctatctggagcacgcgcgcatcttcttcttccaccacggcggcaaccaccagctcttcattgccagcgcggactggatgacccgcaatctggacaagagggtggagctcatggtgcccgtcaccaacgggaagctggcgcgccgcctcaaatccatcctggacgcctgtttcagggacaacgtgcaggcctgcaatattttgcctgacggcacttccgagcacgtcgttcggaaaaagggccagaaagccttccgtttgcagcagtacctgaccaaggaggcccgccgcttggccaaggacaaggaacgggaacgccagcagatgctggagccccacacgccgcattaacccggtccggagcattgggccgcatgcgtggcatcctccggcataccttcaacacgtagcggtccggaacatgtcttttcatgagacatgtttgcccgcgtatgctgttttttcctgatcgcgctggctggggggtacggctctgtatgggcggaaggttcggcatggcaggcgtccgggcctgcgggccccggagcctccgtaagggctccttcccatccggcggaggatggcttgtactcccgtctgaagaagatgccctatctctatgacaacaaggacgcggagttcctgaaccagttcaagctgctgctgacggggcagtaccagggggctcaggtctccccttccggagccaaccggttccgcaagggctctcatggcagggaaaacgaatggcggaggctccagatagggtttgaagccgttttcttcaaaaaccgcctgacgctgcacagtttgaccaacatgggggagctggacggcatgtacaaggtggaggatggccgctggagaagaacgaagacggactggagcatctttgaactctacctgaaatacaaggtcaatccctccttctttgcgcgcgtcgggaaaatcacctccaagatgacggcggaattccgggagacggccagtgaactcaagaccctggaacggtccgacctggtcaaccagctcgggaccatctccagttggggcgttgtgctggaaaacccgcggcaggacgtgcccgtggggtgggaggcttccgtcttcctgaacgacaccagcgacagcctggcgcatgaaatcaggtttaatacggcggacaatgcctttgccaaggcctccgtccatctggacgcccgcggctttctgccgggggagaaaagccgcgtctggctgacgtatgcccacaacttcacccattacgcggggcgctccctgccggaggattcctattactccgggcttggcgcccgggatgtggcggcggtggactgggtcatgtcccgggggaaattttccatggtgacggaactcatgtccggcttccgcgtggtggggacctctctgggagagaatgtttacggcctggcggtattgccttcctacaggttttccccgcatctggaaggcgtgttccgctaccagctctcccatgggcgggacgccgtgaaaatgtacgcccgctatgttcccgcggtgaccacctatcccaaatgggtcagcacgatgaactccttttacttcggcctgaattattattttttcccggaagacccggacatgctgaaattgatggcagggggggaatatacgacgaccagcggagcgccggaaggcgccaggtgcttcagcggatggacctggtttgccgccgtcaggttccacttttgaacggggaagggcagattcctttcctcccgggggattggcccttttgcgggcaatcatgcgggagccgtttacaacaaatagtttgccctggactgtgccttgtggtaggaagggagggagatgggaaagcccgcctttttccatctctccccaccccccctagaatgatgaaatttacatattctctctgcctgtgcattcttgcctgctgcgtttctctggcccagacggcttccttgcgttccgttgttctccctcctccttccatgaaagtggaatgccgcgcggatgagagccccgtttccatttcccgggcggaaatcaagtctcgcgtgatggatttcctggcggaaacggaagtgacgctggtttttcacaaccccaacacgcgtgtgatggaaggggaattggtgtaccctctcccggctggagccatcgtacaggggtatgcgctggacatcaacggccgcatggtggatggcgtgccggtacccaggcaaaaggcgcgcgtggcgtttgaagaagaggtgcgcaaacaggttgatcccggactggtggaatggtccggcggcaacatgttcaagacgcgcgtatatcccattcctgcgggaggaacccgcactgtgcggctgcgctattccacggttcttcccgtggatgccgcaggagcgccgtccctgcagcttccgatgaatttcaaggagaaactggattccctcaagctgagggtggaagtgttcgccggccggaagcccgttgtcgtttcctccccgctggacaacgtggaattcaaggattggtgcagcgccttcctggcggaaaaggaatggaagggtctgtccctgacggaagacctgttcatctccctgccgcgtgcgcagggaaaagatgcggggagagcgaaggtatttgtggagtcctttgacggcagggactatgccgccgtgattattccccggcctgagcggacggacggaaagagcggcgtggaagccgcgcccacgatagagctgctttgggacgcttccggttccatgaaaggagcggatgtccggaaattcctggattttctgaaacgatatcttgcttgcggcagaacgcaggggcggcaaacccgcatcaacctgactgttttccgggaccggatcatgccttcaaaaacgttcgaggtcgctccggacaatctggacgagctggcccgcgaactgctggctctggactatgacggggccacgtgtgactggagcgctgttcgggaaaagctgagcgcttgttccggggcgtcggactgcctggttgtcagtgatggatttatcaatttcagccccgtgccggaaaagcgggggactagctccgctaaaaccttcgccctgatggtgacaccgcgcaaggatgcgaatacgttcatccggatgggcattcctgtgatcgacctggccagtcaaacggcggagcaggcgatggagcgcctcgtcaggggggaaatttccatccgttacattattgacagggggaatatgccctggaggacgttttcaaggtatgaaattcctggaatgccatcggattccgtccttttgctggcggaactggagccgggttcctaccgcgggacggtggaggttgccggagtggaaattcccgtggcggctgatgcctccggggggacgcccggaaccatgctgagggccttgtatgcccaggcaaggctccaggaacttctctgccgtccaccctctgccgttagggatgaagctgtggggaacctgggaatggaatatggaatcgtgacgcccggtacctctctgctggtgctggactccctggagcaatacctgaaatatggtgtgcgtcctcccgcttccgcttcagaattgcgggcggaatatgacaagaggatgctgaaacgcgaacggaaggaggacatggctgaagagaccgcaagattaaaccgcttgaaagcgtgccttgcttcctggaaagaaatgcagaaatggtacgcaaaggaatttttcaatccggaagagatggaaagcgtcttgaaagatgaccggttgaaacaggccttgattcatacgtgccggggcaatgaccgggaggcgctggaaatctaccggaaagtattgaaggatgagcgtaataaccggacggccttgaagggcgtcacggtcatggaaaggcgcctccgggaaaaagaagcacaggctgaaaaagcctctggggaaaacgctgcccgtgacagggagctggctgaggcaagagcaaacttgaacagagaactggacagggagcctgcggacatagcgggaagcctccgcctggcctacggcttttatgaccttggggattacgataaggccctttccctgtttaacaggatattggaaaaggctccggaaaatgtttcggcaagaaggggtgcggagactgtggcccgcagaaaaactgcctattactccgccgcttatgatgaaagaaggagcgccatgctggcggaagtggattctctctgggagcgtccggccggatcctctccggaggatgaaaattcgggggaatccgctccggcgcctgttatagttcaaggtaacaatatatccggagattccggtgctgtcatcagggcgtccggaagttttagtgcagaagccgggagttctccggactccgcctccccggatctgctggagaacgagaattccgctccggaaaatcaagaggtggtagggtccctgttcctgggagggggagaaacattaaatggactaaaggcgcgggaacaggatgccggttcttcccccgtcatgaacgtgaaggcgtgggactccaaggctccgtatctggcggctctggatgcggctgaccgcccttttgcggtctatatgaaactcaaggaaaagtatggggacagccccggtttttacatggactgctctgactggtttgccgggaagggggacaaggcgctggctgtccagattctgtccaacctggcggagctggaactggaaaaccgttccctgctgcgcatgctgggctacaagctgcgttacatgggagaactccggcaagccaggttcatttttgaaaccgtaaaaacgctgtttccggaagaaccccagtcctaccgggatctggcgctggtgctggatgaactgggggaatcccaaaaggcgttcgacatgtaccgggaggtgctggaacgcccgatgccccgccgcttcaccggcgtggagcagattgtgctggtggaactgaaccggcttgtttcccggagcagggcggcgggagtgaagctggataccggggggctgaaccctgcctttctccagccggtggaggctgatttgcgcgtggtcatcaactgggacacagatgcgtctgacatggacctttgggtcacggacatcaccggagaaaaatgctattactcccatcggctgaccactcatggcggccatttgtcccgtgacgtgacgcagggctacgggccggaagaatacctggtgcgcaaggctcttcccggtccctatctggtccagacgcattattacggcacccggtcgcagaaaatgctggctcccgttaccctgtacgcggaagtgtacacggattacggccgtccgcaggaaaagcggaaaacgctggtattccgcctgaatggccgggaccaggtggtggatgtgggaaaagtggcgtacgtacaggcgtgcccggcagaaggagctcgggattaccaggtgaaggccggggaaacccgggcgtccatcgctgaaagccggttgaaggacggaaagcgcgccggggaaattatccgcctgaatccggttctgaaagaccgggaacctaaaacgggggaaatcatcaaactgccggagtgattggagactgcggctcttctcgaacgcctgttgccgccggcggggctatacgccttcaaagacgcgcagcaggcgtttcagcaggttgattctggccttgcgtttccggaagccgttcccgaaggagaacggcaggtgccattgattgtggcgcaattgccgtcgcgtccattgcgtgaattcctccagcaattgggacagatggggccgaagggaggccgtttccatggccggcttccaccagacggccgcagacacgatgtattcctctgatttttccgggaacagccagggctttttggagccgatcatgtggaaaagcttccaggagcaggtggcgtggatgttggaaaccccggcgaattccgtgcctgcgcaggactcttccagtccgtttttccccagttcaaattggaaatggtagttccattcaacaggcagcggaaaaatctgccggtggaagacgatattcagcgcgtcctggtccggatgttccaggagctcattgtgttcttcaatgacgtggagcaggcggacttccgcatcctcctccctcattcggtccaggtccaggaccagcacgccggagttgaaatagtggaagggatcgtgcaggcccaaaggttgaagtttccggagctggcgccgcggataccccgctaccaggctgctcagcaccgccgtatcccgtacggcgcccacggccgccccgcagaggtccgtatcgtaaagctccgctacgtccgcatacaggaccgtatccgcatccagatagacaatccgggaatgccgggggaacaggctgggtgccagcaggcgcgcgtaggccagggcggaaaagcgtttcacgtccctccggcgcagcatctgttccagcttgccgggaatggtcatgaactgaagggctgcgttcggataaccggaaacggccttgtccagttcctgcatgttttcttcttccagcccgtcatggaccacccacagcctgtagttccgttccgggttggaatggcgtgccagggaatgcagggtgacggccaggcacacggtccaggcggaggtgacggcaaacatgacgtctatggcaggaggcgcagcggcagcatggaaggctgtgggcggtgcggcggaaagggaggagggcatgatgttaaaggatgggatggaatcagggccatgagccgtcaaacacggccagttggcgttgaagggttttgattttctcccggcgtttccggaaattccggcccggagagacggggaggctccattggtggtggcgcagccgggaacggaaggcgcgcatgaattgccggtacagggcgcgcagctccctgcggaaagccggagtttgccgggcaaggggccaccagagggcgagatacaggcggtggtagattttttccatatccggcggcagccacggcttgtaatcacccaccaggtggaaaagcttccaggaacggctttcaaacagggccggagcttcttcaaactcggtgccggagatgaggtccgccattcccgcatggtgcagctcaaactggaagtggtaattccagcggaggggcagcggagcaatgcggccgtgaaagacaatgttgataatgtcctggtccacgtacggaaaggaatccggatgggcctcaagcagcctcagcagcctgtcttccgtttcctgctccctcatctggaccaggtccatgaccatgaccccggtattgcagtacaggcgcggattcgttacccccatgccgctgatgtattccagatggtcgggaaggcggcccgtactgatgctttgcaggacggcgcagtcccggacggcgcctatcggcgcgccgtgcaggtccgcatcgtaaagttcggccacgtctccattcagcagcacgtccacgtccaggtaaaccaccctgtcgtgccgggggaacagggcggcggccagcaggcgtccatatgtgaggggggagaaccgtccgcaatccctgtgctgcagaatgcgaagcagcctctccggaagcctgcaaaaccccagcgagacgcggggatagctggaaacggcttttcccagttccttcatctgctcttcctccaatccatgatgaacgatatggagttcataattccgccgcggatcggaatgcacgcaaagggagcgtatcgccacggccagcgggatgagccaggaggaagtgacggcgaacatgacggaaacgggaggttccgccatgccggataagggagagatagtcggcataaaaggaattcaacaggtcatgaagaagaatgggaaaagctgaaagcgtttccggtgcctgccgggaattccggtataaaggtagttgggagaaaggtcttgtttttcatggcggagatgaataccggaagagctgttgaaacagggaaaacgggcatccctgttccggcgttccgttattctctgcatgggacattcccggcggtgaaaacgctcatattttgtttgggcatcatacgaatttcaaatccgtcatggattaatatggaatgattcccgtaccgtttggagcgccgtaaacgcttgcggcttccggaagccaaaccgggaggcagcgaactctctttcctgaaagccagtgcgtcctgacggaatgcatgcatttcaacggctgagaggcttgccgcggtccaggtttccgttgcgtaattccggaaggctttttccgggggaaaacggtttcccctcgaggaagggccacgcaacgtaagctccttggtatgaaaatcggcccttgaccccggatttgaaatccgtttacatagggttttcttggtatgagcgcggctgtttccatcatcgtcccctgttataatgtagctccttatctggataaatgcatggaaagcctaactctccagacgctgggggaccttgagatcattagcgtgaatgacggttccggggacgataccccagccatcctgcgcgcatgggctgaaagggatggccgcatccgggtggtggaccgggaaaacggcggcctttctgcggcgcgcaataccggcatggccctggctggcggggaatatatcggctttgtggacccggatgattacgtggaacactccatgtatggccgcctgctggaaaaagcccgcaggagtgatgcggatgtgacggcctgcggctataccggtttttccgaccgtgacggttccatactggaaaaatggagcctgtcaccggaagaaggagtggaagagaatgtacaggcatgcgtttttcaggaaaatgccgtatggagaaggatggccgccgtggcatggaacaagctttacaagagggaattcctggaaaggaacggcctccgctttgagccccgcttccggcagggggaggacgatgccttctggctgatggtgctggcccacgctacccggctggctgtgattccggatcaattatactggtaccgccgccagaggaagggcgccatctccctggcatgggaggagaaggggtgcccgttgcccctcgttgcggaccgtcttctccatgccaccgcttactggaaaaaatgcggctggctggaatccggcctggagcgcggctgggttctgcatgccctctggtactacctgcttgtccatctggtgcctgcgcacaagccgctcccacgtctgactgcgggggaatgggcgcagctgcacggccagttccgggaatggttctccctggtagaaggcacggagcggttgcagggtcttgacaaatgggaaacagctttttgccgcctgctggaacgacctgcggaacgtcccggcttgctgtcccgcatcttgtggaaacgcctttccctccgcaaagggcgccgcggtcgctattacgctctccgtctgcttctggcttcctgcggaggtaaaacccatagctgatgcaccatgtccgtttccattattgttccgtgttacaatgtggccccgtatgtggaggcctgcctggacagcctggtgaaccagagcttgcggaatattgaaatcatctgcgtgaatgacggttctacggacgtgaccccggctcttttggacgcatgggcggaaaaggaggaccgcatccgcgtcattcaccgtgaaaacggagggcaggcgttggcgcggaacctcggaatggatatggccggaggtgaatacgtgggttttgtggatccggacgactatgtggaaccttccatgtttgcccgcctggtggaggaagcccgcaggcatggcgctgatgtgacagcctgcggctacaccagcttttccgacggagacggctccgtgctggaggaactgagctggtctccggctccgggcgtggacaagggggtgcagtcagacgtgatgcgaacgaactccgtctgggagcggatggacgtggtgacatgcaacaagctgtaccggagagattttctggaccggcacggtctccgttttgaaacttctttcagatccatggaggacgacgtcctctggctgatggtgctggcccatgccacgtgcctggctgtgataccggaccgcttgtattggtaccgccgccagaggcacggctccgtctcccagatgctggaagcgcaggaacgtcccctcctgctggtggcggaacggctgctgcatgctacggagtattggaaaaaatgcggctggctggaatccggcctggagcgcggctgggtactccgggctctgaggcattatcttctggtccggctgctgaatccggggcagcccctgccgcagttgagtgaggaggaatgggggcgcctgcgcggcaaatgccgggaatggtttgccctggcgggggaagcggaagcgttccggactctcggcaaatgggactttgagctatgccggatgctggcttctccgccggaacatcccggcttcctgtcccgtgcgtggtggaagcttctctcccgctgccgcggacggcggggacgttactacaggcttaaagggaagctttcctcttgcggcggtgggaaatagcttcccggcggactggttcttaacattctgcgcatcgttggggcttgcgggaacgcctgtgttgaagtaaggtagccgttgcgggaaaaggcgcgggcatcatgaatcatggtttccgctggtttttcccatgaaaaactgaatgatactcccgatttctctatggatggtactgtttccattattttaccctgctacaacgttgctccttatctggatgaatgcctggaaagcctggtccggcagacctgggaagacctggaaatcatctgtgtcaacgacggctccacggacgatacgccggccgtactgcgcggatgggctgaaaaggacgcccgcatccgggtgattcaccaggaaaacgggggcgccttttccgcgcgcaatgcggggctggatgcggcggcgggtgaatacatcggctttgtggatccggatgattacgtggatacctccatgtatgcccggctggtggaaaccgcgcagcggcatggtgcggaggtggcggcttgcggatatacctccttttccgaagaagacggcacggtgatggaagacgccgggcacgcgccggaacccggatttgaacctgatgccaaaaaatcctgtttcagcggtgagtccgtatggctccggatggacgtggtggtatggaacaaggtgtacaggcgttccttttttgaagaaaacggcctgcgcatgaaaccagggttccgcggcggggaagatgacattttctggctgacggcgcttccccacgcgtcacggctcgcagtcattccggatcaactgtacttttaccgcaggaaaagggccggatccctttccgacgtctgggaccgggacggatggttttactccatgaacatggaccgtctggaatatgtgacggcctactgggaaaaaatcggctggctggaatctgccgtcaggcagggctggctggcccatatcatgaagcgttatctgctggctcacgtcacctccgcagaggaaatcttccggcggctggatgaagaggaacgcaggggactggcggcgcgttaccgcaaatggttgaaaggcgtggaaatcggtcccggctttgcaggactgaacaagtgggaccgcgcgttctgccgcctgctgggtgcggaaccggtaaagctcggtccctgcgcgcgtcttcacagtaccctgatgtcggcatgcagcggaagaaaagggcggtaccaccgtcttaagctcctgttatccggattatcatgaagaccgccgtttccgtcattgtcccctgttacaacgtagcgccctacgtggacgaatgcatgtccggcctggcggagcagacgctgggtcccatggaaatcatctgcgtggatgacggctccacggacgggacgctggagcttctgtacaggtggcgggaaaaagacaatcgcctccgggttatcagccagtccaacgccggagtgtccgcggcccggaatgccgggctggatgccgcggagggaaaatacgtgggctttgtggacccggatgaccgggtggaccggaggatgttctcgcgcctgcttggcgccgctgaaaagaatgatgcggacgtcgtggtgtgcggttgccgggaattcgtggaaaaagacggtgtggtcgtccatgagggcggctggtccccggatgatgaattttatccggaggaacgggtggagcaattccgccgcggttccgcctggtgccggtgcgtgggtcccgtatacaacaaactggtccgcagaagcctggtggaagaacattccctccgttttgtggtgggcttgaaggaaggggaggacctggccttcctgctgatgctgctgcccttcgcaccccggctccggaccctgtcggaccgtttttaccattaccgcagggaacgtcccggctccgccacgtatggacgggacttgctgctgggcgacttccgcatggacctgctgggcatggaccgggtggcccgtttctggcagcggcacggcctgctggattcccccgccgtcttcgggctggtggactactacatggaattcatccgcaggcacttcatcatgaaagaaggggccttcttcaaggcgtcgccggaagaccgggaaaccctcctgtccgggtggaaaaaatggctggaactggtgggcggggagaaagccctctcccggctggaccggtgggaccaggcgttctgccgccttctgctggactatcccctccagggcaatttcttttcttccctgcgtgcccgcctgatgtcatcccgcaaaggacgccggggggcttattataccctgaaaaggcacttggcgaggtgagagggaaaacccttcttccctcggttttttggtgtggtatgagaccgtgaaggagccggaatgctttccggaatcctacaggcccgtgtagcacatctgctccttgagctgggctacctggaggtcttctcccaggtattccccgatgcagtagccgaagagcgtggcggctccgggaccgttggcggtgagcatattgccgtccagcaccacgttttcatccttcacgatgtgggctcccgcctcattgagttcccggtagacgtcctgggccgggtaggccgtaacgttcttgtccttgaccagaccggctttcgccagaacgataggggcggcgcagatggcggccaccagcttgcccgcggcatgcatcttcttgaccaggtggatgacttccggcgtgtcgcggagcacccaggcgcctgcgccgccgggcaggatcagggcgtccagcttgtccgcatggagcttgtccagcatggtgtccgtggtgacggtcacgtcatgggtgctgaccaccttgtcagactgcacgccggccagctgcacgtcaaagttcaggcggcgcaggatgtccagcggagccatgagttcgatttcttcaaatccgggggcggcgaggatggcggcttttttcatggttaatgagacaaggggagggaatggaacgttcaaggaaaagggggcaggatgccggcagccctacaggagaagcaggaccggattttccagcagcgtcttgaattcggcggcaattttggacgccttgcattccggcaggatgttggcgttcacgtacagggtgacgggcaggatgagcttggacacggggcgtcccgcttctatgcccgttttcggcgtggtgccgccgatgctgatgatgctgtggggcatttccgggagcacggtgcgctgggcttccacgttcacgccgctgtcgcagagcaggatgttgggcgtgatgctgcccgcggggggcggccctgccgcgggggcggccagccgttccatggcgatgttgtaaatcgtcttgccggaggcgttttcaataaagacgtatttttcccccttgtccagcaccatgagcagttctgcggcggagtctcccgccagccattccggctcgctgatgcacgctttcaccgcggcgcgcaccacgtagtcaaagaggctgtagcggccgccgatgagtttttcgcactggacggcgatgggcgtgctgatggcggccaggtaggccatgttcgcctccagggagtacaggtagaaattatccacgcgcgtggcgtggcgcgtgtcccggggcgccagcggggtctgcacccggcgggcggggccgtctgcggggcgtatggaggcgcgcacgtccgcggccatgatcttgccgcgtggtccggtgccgcgcagggttccggcgttcagcccggcttccgcggccagcctggcggccagcgggctgcatttgacgggcgggcacggagggcagtcgcaggaggcggcgccgaattccgactgaagcagcgcaatgggagcgcccaccgcggcggaaccgccttccggcaccaggatttccatcagggttccgtcctcgcatgcctggagttccacgtgggccttgtccgtctcgatgtcggccagatggtcgccgacttctacgaagtctcctatctttttgacccatctcaggacgattccttcgtgcatggagtcggacaggcggggcatttcaatggtaatagccatggaggtgaatgttgaacgttggaatacggtaagagggggatggcgcgccggaagggtttccgtcccgtccggcgcgcgggtgcgcggttacgcgctgtatttttccacgccgtcgatgaacaccttgcaggtgttgaagtcatcgtccagcagaaccatgtctgccgtgaagccgggggcgattttgcccaggccttccaggcccagggactgcgcctggttccaggaggtggatttcaccaggtcgctgaggggcttgccggtcaggcggtgcacgtttttcaggccgtgggcgtatttgagggtgctgccggccagcgcgccggattcctgcaggcgcgccacgccgtccttcacgatgatgggtaggccgcccaggtctccggggccgtccggcatccaggagcaggccagggaatccgtaatcatcatcatctggtccgtttccttgttcttgaacacggtcttgagcatgtccgcgcagaggtggatggtgtcgcagatgatttcaatcttgatttccctgtccagcaggccggagcccaccaggccgatttcacggtggtgcaggggggacatctggttgcagtagtgggtcaggtgcaccaggcccgcggatttcgccttgttgaagtccgcatgggtggccgcgctgtgcccggcggagcaacggatgccgctggccgtggctttttcaatgaattccacggctccgggcatttccggcgccagggagaccagcagaaccttggcgatggagttcaggttggctacttcatcatagtccggctggcggacaaaggcgggattctgcgcgccgcagcacttgggattgatgaacggcccttccagatggatgccgggcgtcttggcgaattcctggttcttcatgtattccgccacagaggcgcacacgtcttccagcaccttgggagacagggtgagggtggtcggcagccaggaggtgacgccttccttcatcttgcattccgcaatggtgcggaggctttccagcttggcgtcgcaggtgtcgcagccgccggcgccgtggctgtggatgtcaatgaaaccgggaaggagcatgcggccttccgcatccaccaccttgtctgcggcggggagttcgctcccggcgggatagacggcggtgatggtcttgccttcgatttccacggcagccccgggcaggtcaatgccgggggagatgatgcgtgcgtttttaatgagtgttttcataaaaatgaatggttggtggatggatttttagagtcgcttgatgatgaatacggggttgtttcatgccgtttttccggaaatgacgagccacgaccatttgcggcagcggggacagcgggcaaagttccttttcctgcctgccgatttgtaaaggatgccgtatttcccgaagggttcctccaggccgcagcggttgcagcggatggtccatccgggcgcttttttttcccatttggcgacgttctccggcgtggcctccactttctgcggagtgaagacctggttgatgaaccgcctgagaatattcatgccgttgattgctcccggtttatttggcggcgtccagcgccttgttccactgggccacgcgggcggcttccgccttcagcacggcggccgcggcgttcttgtccagaatgcggatgtccttgatcttgtctccccggacgatggagttgacgatggcctggcctttcagcaccttcccgaaaaccgtatggcggccgtccagatgaggcgtggcaacgtgggtgatgaagaattgggagccgttggtgccgggtcccgcgttcgccatggaaagcacgccggggccatcatgcttgaggtccggggaaaactcgtcttcaaagctgtagccggggcctcccatgcccgtgccggtggggtcgccgccctggatcatgaagtccggaatcacgcggtggaaggagattcccttgtagtagcccctgttgatgaggttcaggaaattggctacggtgacgggcgccttggaggggtaaagggccagttcaatgtcccccttggtggtggagatgacgatattgacgtccttgaggccagcagtggatgccgcagaggcggtgtaaaaggaggatttttaaagattactgcctgattgccagtacattttatcttgcgcccggcgccacgcgggaaaaacggaagatcacccacgccatgccgaggctcaggattcccatgacgacgaattgccaggaggggggaatcaccagcatcatggcgtattggaatccgacggccatcagtcccagcacgcagtccaccaggttgccggcggcaatcatgtccccgcgcttgtcgttgtccgcccggtcctggaagaaggcgttcagcggcaccaggaacagtgcggcggagatgcccgccgccatcagcagagcataaaagaccgtggaagtcatggagaccgtagagagggccacgcagctcagcgccatcagcgcgcctcccgccacggagacgttcatccggatgtggcggcggcagatcagggaggccaggatgccccccagcacggttcctccgctcatccaggccatcagcacggctcccacggagctgaaatcgtcgctgccgccggagatttccttggccatctggatggtcatcagcatgatcgtgccgccgaagaaccagaagtagccgatgcccatctcgctgacgcgcaggttgcggtttttccacagcttgcccagttggtggaagtgttcgtaaaacagggaccaggagaagggccggaaaccctccggagcgtaccggggcaggtagaagctggaaatcgccacgggaacggccatcagcaggaacaccaggcaggggaaggaggcggcataccagccgtcgttgaggccggagggtttcagccaggcgtcaaaccactggaagaagccttcccccagccagtggtgccagacggtatccgtggaaggctccagcaggtagcggaaccagacgaaaacgccgatctggccgatgagcaggctgaggatggaagccatttccacaatgccgctggcgaaccccatgcgggaggtgcccacgatgtccttgacgatgcccttcttggacgggctgaagatggtggcctgcacggcaaagacgcagaaccacaggatggccccgtccaggttatgggtacgcaggctccagtacatgcccgccagcacgcagatctggagcagcgccatggactggatgatgcgcgccttgcagaaacggtccgagagccagccgacgaacggggaaaacaggatgaagggcagcacgatgatggccccaagcgggtattccaggtctccctgcgtgccgtacagccagacgcccaggggaatgagcaggaattgcgcccccttttcattaaaggaattctgcgcctggatcagcacgagtcgccagaaggctccccatggaaccttgccggcgtttccgggcgtatgggggctggggttcatgaaattacaggttgggctcctccgctttttccagtccggagccgcggaacaggcacagcacgccgatgacggccacgagcaggacgctgcagaccagggaagcttcataactgaacccgcacatttccgggctggagaacaggtactggagcaccaccaggctcaggaaggcggcgggaacggcggccgtccagcagcagcggtttttgctgcgcaggtaaatggagacggcccagagggtggcggcggccaggagctggttggcccagccgaagtactgccagatgatggcgtagtccatgctgcttacggcaatggctgcggcaaagagggggatggcgatcatcaggcggcggctcagttgctcctggttcagcttgaagcaatccgcaatcatcaggcgcgtgacccgcagggcgccgtcccccgtgctgatggggaggatgaccacgccgaccatgaccaggatggagccgacgtggcccatccaggattcggaaatcatctggatggccagcgccggggcctttccgttggcggtagccgctcccagggcttccggggtgccgtagaaggtcagcgcggcggccgcccatatgaaggcgatgattccttccgtaatcatggctccgccgaagacgggcagtccttcctgctccgttttcaggcagcgcgccatcagcggggactgcgtggcgtggaagccgctcaccgctccgcaggcgatggtgatgaacatcacggggaagagcgggaaatccgccgggtggcggttatggaagaagtccaggtccgggagcacttccatagaaggaatgtgcatccagtacggcatgaattccgcaaagggagccaggagcatcacgcccagaatgcccacgaccatgatgatcagggcgacggagaaaaggggatacacctttcccatgatggcttggatgggaaggatggtcgccagaaagtagtagccgaagatgatccacacccatgcagaaacgctccagccagtcatgggggccaggatggcggcggggcccacggcgaagacgacgcccaccagcacgctgaacacgatgcagacggcgcggctgatccactgggcctggctgcccaggtagcggcccaggatttccggcaggttttcccccttgtggcgcagggaaatcatgccggaaaagtaatcgtgcaccattccgccgaagatgcagccgatgacgatccacaggagcgcggccggcccgtacagcacgcccatgacggcgccgaagatagggcccagccccgcaatgttcagcaactgaatcaggaacacgcgccagcgcggcatcaccacgtaatccacgccgtccgtgcaggccacggcgggagtctgccgcgaggcgtccggccggaaaatcttttccagcacccgcccgtaggtgaaataaccggccgccaggatcaatatccccagaatgaagtagcagtaaccgttcatgttggaaaaaggtccagccatctcatggacaggctgtccgttcggggaacttaactgttctcctctcttctggcaagccgttagtgaaagagaaaaaaatacggaacggattgccaatccgaaaaagaaatccgatgtgccatttttatgcataaaaatctggcattgggaattttacaacgattttaatttcccaaaaaagaaactctcatcagaaaacgcccctgggcgtttatcttcctaaacatcttgtttttatcatttattgttgacttcggattggcaatccgctaagggataaaggttgctttcatccaacctctcctagttatgaagaaatcattgataatcattgcctccctgacttttggaacagcagtttcccaggctgcggtgttgtgttccactacttttaaccggaccggcacttccctggataccgtcacggtgaacacgacatccgatgtagggctcacttcctccacctcgatcagttctgacgatttcagcaagagcacctcgggcaatgacctcctggcctcaggttccattccggcctccgtgttttctcccaatgccaatgtgggaggcgccggaaacaatacatggagcgtttccttcacattcaccaataccggttcccacgacatgctgatatcttccattgacttgtccatggtcgggttcacgggtgcgggggctgcccagaatggcggtggcggtatagccaataatggttatgtgggcggatatgaaggcaatttcaacaaacctgtcgatatgactctctccattgacgggcagccggaccagacgctgacctataacggttccaccgccgccaatggttccaccggcgcatggaccggcattcatacgggaagccacacgtacgatgattttctgctgaaagccggggaatccctgaccatcaccatcacggcttccaataacagcgcttataacaagggctgctttgccgggctttcgggaattcagattaacggtgatttggtggttcccgaacctgccacggcctccctgggtcttctggggctggctgcgctgatgatgcgccgccgcagactttaagtccatgctcctgaaacatttgatcaagccgtccgttttttgaaattggcggcttttttattttcagttagcagaatctaacactttttaatatttaatatcagtaatcaacatgattcctcaggcagtttgttctttagcctgatgcctcttgaatcacttttccgccagcttgccatgttcctgtaccgtttcttatctgttcttgttccttctttattatttctcgcgccagccaggtctgccgccgatgaatatgtctggaaaggggcggcgtctccctggtcgaacttgtcaaactgggctctgaacggaagcgcgccggcggctgctcccggcgcgtcggcctccgcctacacgcattggatggtcacgaacgggacagactcggctggcatgaccaatataggcgggttggggtccggaggacggtatttgaaaggaatccgggtggcgggagttaacaatcagccgggaggaaaggtccagctcttcgtgttgaatacttcttccggcgtatatctgcgcgtggagacgggcggcattaccgtggaaaacacgagcacgggcggttataatgcggatttcgggattgcgcagctgcgcgtagccgccgaccaggagtggaatgtggcagaaggccgctgtttttatgtggggcaggacgatggagctccctccggaggattgtattccctgacttctgaaaatgatgctccgcggcgcgtgacggtgacgggagggggagccgtgcgcattggagaaggaatgctgctgaataatatttccggcctcatcggttttgtaatgaatgccgggaagggaatgcccacgctggacctggcggaccggggcatgagcaatacgattacggtggaagacgccgggcggctggagggcatgtccctgtaccagggctccctggtgacgcaggagaaggcctccgtgactttttccggaacctctgccaaggcgtccggccaatggaacatcggcgcgaacacgggatttgcgctggaaaattccacgctggacctggcggaaactggagtggacgggaatgtgacgctttccggctcatccggcattaccggtgacaaggggacgctgaaacagacgattctggatgacgcccgggtgacttatacggaccggcacgtcaaggcgggggaaatccggaacgtgggcaggaatgtaacgattacgctgaacaactcctccatccattttgacggggagattccggcggtggacctggtggtgcaggggagctgcacgctgggcggcagcggcacgtttccggggacgatcacttatgcgcccggaggcgctctttccgtggagggggacatttccctgcccagctcttccctgacgctggggcgcgtccatgtatccgtgctggacggcgtgccgcaaaagtcagccgtacagccggagagcccctccctgcaggcgcgggaatacgttgtcctgtttgattcctcttttgaagatctcattgccgcgtggccgggcaggcatacgctgggcgtgcagttcaagccggaaacgaccgcctccatcaccgtgaaggaactgccgaaaggggcggtttcatggaattatgatgaggcggccaaattgctgacgcttcagacggatgtggcggaaaagccggccatgccggggcatgtttccggggccaggcccaatatcatcttcgtgctggtggatgacatgggctggggcgacctggaagaaaactggaaccatcaggacaagaacggaagaacggtgacgcggcgcaacagcttcaagacgccgcagctgaattccatggcgacggaagggatgcaattgcggcgccattacagcgccgcgcccgtttgcgctccggcccgcgcctccctgctgctgggggtgcaccagggccattcccgcgttatccgcaacaacagctttgattatcccatagaaaactcccacacgctggccacggtgctgaaaggcgccgggtaccatacggcggctgtcggcaaatggggcatcggcggctacgggcaggggccgtccggcttgtatgcccgccccaacgaacgcggattcgattacttttacgggattatggagcacctgacggggcactaccactacatcacggaatccaagaacatttacgaatacaatgacggcgcctcttcccccgccttcgccaatgtgacgaacaaggttccggatacggcttatgacacggacctgttcggcgcgcgcgccaagcagtggatcgtggaccaccatgccaaatcggccacccagcccttcttcctgtacctggccttccccgctccgcacggttccctggcggtgcccgcgtgcgcctatccccccaaaccgggcctcaagggaggcttgcagtgggtggccgggaatgaggacgggtatgaagcctccaacacggctacggcgcagcgggcggcagcggccggggtggaaggaaccttctccaaggatacctacatccatccggacaatgagggaatcaatgacgcctcccccaaccagacggagaaacgccacgccaccatgatcaggcgcgtggatgatgtgatgggggatttgattcaaacgctcaaggatttgggaattgatgacaacacgatgatcgtctttacctccgacaacggacctcataatgaaagcggttcggacgggcagcaccagcggggggcgcagaatcccgccttcttccaaagctacggcatgatggacggcatcaagcgcgactgctgggagggcggcatgcgcgtgcccaccctggtgcgctggcccggcgtgattcctgccaacggcatcagcctgaatgcctgccagttccatgactggatggctacctttgcggatgcggcgggcgtggcggttcctgcgcgttgcgacggcgtttccctgctgccgacgctggccggcgttccggaacgccagaaggagagcctgatttattccgaatataactatggcggcaatggcgcctcctatcaggacttcctgtcgcaccacaaaagctctccccgcggtttgcagcaggtcgtgtttgtggatggccttaaaggcgtgcgtttcaacatttccgggacggatcaggacttccagatttatgatactgaaaaagacccgcaggaagcttccaatctcgcctcctcccgtccggacttgcaggcgaagatgaaggcccgggccttgtctgtgcggcgctccctgccttccacgaatggaactctgaatgccggtgacgtgcccgctgcaacggctccggccaatctccggcaaggtctgaagatgcgctactggaaccgtggttttgactgggtgcccgacttccgccagatggaagaggctccctctgtcacaggcgctgtgtcttctctcagcgtgaatgccggttccgccgctcaaaagggggtggaactcacgggctaccttaccgttcccgttacaggggagtacaaattctaccttcagacggattccaacgcgggatccaaagccttcgtacacctgcacggcatgcagctcattgatgccgactacgcctatacgccgggcacggaagccaactccaatgcccggcagggttcggaagtcacgcccaatgcggtacaggccgtccggcttgcggcgggggtgcatcccatccgcatcggttatgtgggccacgcctccggctctgccctcaccatgcaatgggaggggccgggaataagcaagcaggagattcccgccagcgccttcagctatgaatacgtaaaccccgtcaatattgacaaaacggaggaaaccgtagggtttgccgctgcctccaccacgctgaccgtgcagacgcagcttccatggacggcctcctgtgaccaggcctgcgtcacgatccggccggcttcaggctccggaactgccacgctggacattcaaatggaagccaacgcccagcaaacggaacgggtggccgtggttaccgtccagtgcggcggcgaggaaagaacgttcacgctgacccagtccgcggctccggccccggcagggtacgataagtggaaaaaggacaacttcggggacggaacgccggaggaccagatggctccggatgcctgtcccgccggagacggggtcaccaacctgatgaagtatgcaacgggcctggaccccaacaaaccgtgcggaagcgtgacggggctggcgatccgggaggaagggggcaaaaaatacctcgtgctttcctggccggtaaatccggaagcggcggatgtggcgttcagtgtggaaagttcgtccgacttgaaggaatggtccgatgaaggaatagtcactccggccggtgtccgcggggaattccgtgatacggcggctctggaggaaagcgccccggcacgccggttcctgaggttgaaggtgacgaggtaaggaagaaataaattccaccccgtttcccggtaacggttcctctgggaacaagggcctcccggcccttgtatctgttacagaatttcccctgaagaaatcatcctgccaattccacttcgccgttttgcctgtccgtaaacacggcacggcgattgcctccgtgcttttagccggaaaaagaaatccttgtcttgcaaaaagacaaggaggattttttactgttcagcagggttttattcctcgccgttttccggatcggccggaggggctttgggaaggtttttatcaatgtcttccaggaggttgaccaggtcaacgccgcgctgggcggagtcgtccagccggaacgacaggcgcggcgtgttgcgcagcaccacgcgcttggctacggcggactggatgaggccatgcctggagttcagtttttccagcacctgggcgggggacatttttcctacgacgcctacccatacttttccttctttcaagtcgtccgtcacttccacttcaataacggtgacaatcgttccggggaattcaaagtcccgctggatggtggtgcctatttcacggcggaggagttcatttaccttgtcagtgcgtctgctcatatgaagggatagagtgatggatggaccgattggttcaatcggagaaggaagaatgggggagaaaggacagggatggagcttctttgaacgcccggagaggcgtgaaaggggcgtccatccctgttatatggttcctgcttggggttacagcgtttgctggattttttccagcgtgtagcattcgatgatgtcgcctgcctcgtattcgttgaagtcgcccaggcggatgccgcattccaggccggccttgacttcttccacttcatcctggaagcggcgcagggtggacattttaccgtcaaagacgggagtcttgtcgcggataacgcgcgcttcacagctgcggaggatttttccgtcctccaccatgcagcccgccgcgcggcccttgttgagtttgaagacctggagcactttggcgtggccgatgatggtttcacgcgtttccggttccagaagacccagcatggcatccctcacctggtcgatgagttcgtaaacgatggagtaaagcttcacctgcacgccttcccgcttgagcagtttcacggcgttggcttccaccttgacgttgaagcccaggatgacggcgtccgaggaggaggccagcagcacgtccgattccgagatggggccggcggaggcgttcaggaagacgcattccaccttgtccgactggatgtccataatggccttcttgatggcttccacggagccctgcacgtcccccttgagaaggatcttgagctgggctttctgggtgccgtcgcccatcatggcgagcagttcttccatgcgggccttgcggggctgggccaggcgctgcttgcgcagttcctcctggcgttcttcgcccagcttcttggcggcgcgttcgttttccatttccaccagttcgtcgcccacgttcggggtttcggaaaagccggtaatttccacgggcatgccgggccccacctttttgacgcgttcgccgtggtcgttgaccagggcgcgcaccttgccggcgtacgggccgcagatgaagggcatgcctacgcggatggtgccgctttccacgatggccgtggcggagctgcccgtgccgggttccacgcgggcctcaatgatggaggcgcggcagttggccttggggttggcctggagttcgagcacttccgattggaggacgagaaggccgagaaggtcgtcgatgccgtcgccggtcagggcggagacttccacgcattccacgtcgccgccgaagtccgtgggaaccagtccttcctccatcaggccgctcttggtcttgacggggtctgcggccggaaggtcgcatttgttgatggccacgatgatggttttgccggccgccttggagtgggcgatggcttccctcgtctggggcatgatgccgtcattggcggccactaccagtaccacgatgtccgtcacgtccgcgccgcgggcgcgcatttccgtgaagatggcgtgtcccggggtatccaggaaggtgagggtgctgccgttgtattccaccgtataggcgccgatgtgctgggtgatgcccccggcttcccccttggctacgcgcgccttgcggatgtagtccagcagggaggttttgccgtggtccacatggcccatgacggtgatgatgggcgtgcgcaggatgagggtggccttgggttcttccaccaccggcacgggttccggttccttgaccggttcctgctgggccttgacgccgccgcccttttcccgtttttcacgggcgaaggtgtagccgtgcaggtcgcagatggcgctgacggcgtccgcgtccagcggcgtattcgggttggcgaagatgcccatgcccatcaggtccttgatgatctggaagggcttggcttgcagcatgcctgccagctcggagacggagacgggcggcttgaggttgatgattttatcgtctgcggagtccgtttcctggggggcaggcgcggcagattctgcggcgggtgcggcctgggcaggggcggtagccggctcggagggagcggaggcgggcgcttttttcttggggccggaaagcaagtcgagagcttctttcttgaccggggcaggacgggatggcgccggtgcgggttccggctggggtgcgcgtttctttttgggagatccgccgatcagatccaacacttcctttttgggttcgttctcttcttgtttattaggcatcttaatttaagtttgttagatattgagcgccgcgctcaacggttattgggagataaggtcccgggccttgtccagaatctgggcggcttcctctgcgggaatgcccatgctttccgcgatgtcggaagcttcaaatccggtgagggccaccaggtccgtcccacccatggtcactaggcccatggcggtttcttctgggatttccagttgttcgctgagggtctttgcggcggcctggcattggcgcatcacttcctcggccgcggcctggttctggcgtttttccgcttcctggacgtcaaagacgcgcacctggacgtcccagcccatcaggcgggaggtgaggcgggcgttctggcccctgcggccgatggccttggagaggtccttgtcgtcctggacgatgacgaagatttttttggcttcctcgtccacggtgatttcccgcggttccacggggctgagggcctcccggacgaagatgacggggtcctccgtccattccaggatgtccactttttcgttgttgagctcccggacaatgtttttgacgcgggctccgcgcatgcctacgcatgcgcccaccgggtccaccttgtcgtcatggctgatgacggccaccttggtgcggtagcccgcttcacgggcgatgccgtggatttctacggtctggtcgcctatttccaccacttccgattcaaagaggcggcgcaccagattcggatggctgcgggagaggatgacttccggtccgcgggcttccgtgcgcacttccaccacgtagaagcgcatgcggtcgccgacgctgtagtcttcattcggcacgcgttcgcgggaggtcatgacgccctcgaatttgccgaggtccacaaagatgtcccccttttcaaagcggcggatggtgcccgtcaccagatcgccggcgcggtccttgaactcgtcgtaaagcatttccttttccgcatccagcagcttctggagcatggtctggcgggcagtctgtaccgcgatgcggccaaagcccttcggcgtgatgttggtgggcagcaggtcgtgcaggacggcgttccggtccagcttgacggccagggagagggggatttggttgaacttgtcggagtattcttcatccggcaccacttccagatccgcaaagatgcgcaccttccccttgtccacgttgatttcagccctcaggtagttgatgctgccggagccgggaaccatcttgcggtaggcggagagaaaagcggattccagagcgagaagaattttttcacgggagagccctttttccctctcgtagtagtcaattaaagctttgatatcgtttgtcatgagtgtggaggagtgtgatggatagacaaaaaagagcgggtcgacagacccactctcgagtgtctctcggggtgtttgcctatctaagtaagcatgagggggcggtcctggcaagaaaaaacgcttgttctatgcggcatgcaaaagactggggatgattccggaagaagggttttcagcggtcccctggaagggtgcggggcgggggtgtttgagggcttgacggagccggcaaaaacgggaagtatgcgtgcatgaaactcgtctcatggaatgtgaacggattgcgggcgatcctcggcaagggaatgggggacgccgtggaggcgctggagccggacgtcctctgccttcaggagatcaaggcgcgtccagaacaggtgaatgacctgtggatttcctcctggccgcaccagctctggaatccggcggagaaggccggttattccggcgtgctgatcctcagccgtgtgcagcccctttccacgtccaccggaatcggctggccggagcatgaccgggaggggcgcgtgtgcacgatggagtttgaacagttttacctggtcaactgctatacccccaattcccagaacgagctggtgcgcctcccgtaccgagaacagtgggatgctgcgttccgcaagtatgtggcggccttggcggaaaccaagccggtcgtcttctgcggggatttgaatgtagcccatgaggagatcgacatcgcccgccccagggagaaccgtttttccgccgggttcagcgaccaggagcgcgccgggttcacgctgctgcttgaggccgggttcacggataccttccgcgccctgcatccggaggaaccgggctggtacagctggtggtcctaccgcgcaggcgcccgcgcccggaacgtcggatggcgcattgactacttctgcgtttccaatccgctggctcccagggtgaagggcgccgccatccatccggacgtgacggggtccgaccattgccccgtcagcctggaaattgactgctgaacgcggtcttccatacggttttcaactgcaaaaaattcatgatgatggaacaagaattgcctctgctggtggttgccacgcgcaacgcccacaagaccggggaaatccgcgccatgctggccggagaatgggaagtgaaggacctttccgactacccccaggctccgcccgtggatgaaacgggagtcacgtttacggagaacgccacgctcaaggcgctttccgcctccaggtgcattcccggcgtcctgctggcggatgattccgggctggaggtggatgtgctgggcggccgtcccggcgtctggtcctcctccttcggcggggaggaagggaaccacgcgcggaacaacctccgcatgatggaggaactgcggcgcgccggagtcaagccgggggacaagccctccgcacggttccgctgcgtgatggtgcttgccaggaatggcagcgtgctggcggagttttccggttccgtggaaggccacatgctgacggaaccggccggggaaggggggttcggctatgatccgctgtttgtcccggaaggccatgaactgagttttgcccagcttcccatggaggtgaagaattccatgtcgcaccgcgcccgggctctggcgcaggtggtggaatggatgaaggaatgccgggactgatggtttttccgggcatttgatggtgaactggccttgttcccgtatttttacggggaaggtcagtccagcctgaacgcgcagatctggaagggggccggagttccggtattcaggagctggtatttgccggtgcgccaggaatggtgcggcaggcgggaaaggaaatcctccacggcttccgcttccgcatccccgccttcgtggccgggatagcacatgacgctgagaaggccgttcggggcgatgagggcggcggcctgttccagcgccgccagggtgcagcccgttctggtgatcgtttttttatccccgcccggcaggtagcccaggttgaagacgacggccttcacgggaccggtgaccagttccgccaggcggtcatggctggccagatggaggtggacggcggaggtgagcagcccttctttctccagacgctccctggtggcgcgaatggcttcctcctgcacgtcaaaggcgtgcacctggccggaagggccggccagacgggccaggaaaaccgtgtcgtgtccgttgcctgccgtagcgtccacgaccgtatccccgggcaggacgacgcggctgatccagtcatgcgtgcaggtcatgggacggctgagcagggaacatttcatgaccgggttttataggagccgcccctgtatgacaattcgtttgtaaaaattcccgtgcaggaatgatgacaggttgtttttcagcaaggcgtatgttaggaagaggcataaaaccttgtacatgcctttgcatgcggggataaaccactgactttgcaacgaagatgactgacagacgcacttttctaaaagggactgccgccgtaggggcgctggcagccatatcggacatggattccctgttcgcccaggaggccggagcttcggcagcttccggcattccggacttggtggccgtccgcaacggaacccgtgcggaaatggtcaggaaggccgtggatacgctgggaggcatgaaggcattcgtcaagccgggccagaccgtcgtgatcaagcccaacatcggctggaacaaggctccggaatccggctccaacacccatcctgaaaccgtcgccacgctggtggagctgtgcaagcaggcgggggcgaaggaagtcagggtattcgaccactgctgccacaacggcgcctatgaaggcagcggcgtgaaagaggccgtggaaaaagccgggggcgtgatggtggacggcggcaatgaagggcagtacgtgcagacggaaaacccgaaggccaaaaaattcacctccgccaaggtgcacaaggccgtgctggaagcggacgtttatatcacctgccccccgctcaagcaccacagcggttccgagatgaccgcctgcatgaagaacgtgatgggcaccgtctgggaccgtggagccatgcataagaacgacctgcaccagtgcatcgcggacgccgtgtatttccgcaagccggacctgtgcgtgctggacgcctacatgcccatggtgcgcaacggccccgtggggaaggacacgaatgacctggtggagcgcaaaacccttctggcttcccgtgacatcgtagccattgacgccgcaggcgcggccctgctgaacaaggccggaaagatccgccacgtgcagcttggggaagaaatggggctgggcaccgccgacctttccaagctcaatatccgccgcatcagcatggcctgacgcggcgccccctcctgcggatgacgcgaagggggccaactttccgcctccggcgggtttaaaataaatatgtcagtcatcaaagcctttttcgtcagtccgctgaagtggctccgcgtgacggtggccgtcatcttcttcctcgggattgcgtacgctttcctgcaccatatccccgcgtggaacgtgccgaacatgacgggcggcggagagggcatggaagactcctttttcctggctcagtggcaattcattccatccgtgctcgggactctggacggggtggccgtttccgccgtgattctggcggttctgctgctgcttacgctgctgttcgggagggtgtactgctccttcctctgtccgctggggattctccaggacatcgttttcagaatccgccgctggattgcgccgaagcgcttcttgaagtttgcgcgccccgtgccgtgggtgcggtatgtggttctggttttgctggccgcctgctgcgtgacgggactggccggactttccctgaactggctggacccgtacagcattttcgggcgcatcatgtatgtgctggcgtggcctgccgccatctggagcaataacctgctggcggctgacagttcttccgcggacctggtccggatgaattattttcccgtggctctcccggctctgctggcttctgccggcatgctcggcctggtggtcgccatgagcgcctggaaagggcggttgtactgcaatacggtatgccccgtcggtactctgctggggctgctttcccgcgtttccctcttccggctgggctttgatcccgcctcctgcaagaaatgcggcaaatgcgtcaaatcatgcaaggcccagtgcctgaacctcaaggaatacaaaatagacgcctcccgctgcgtagcatgctatgactgcgtgcgttcgtgcagcgagggggggatacgctaccgctggtttgccaaaacccgccgcctgattcccgccaggaagaaaaaaaccgctccggcgcccgctcccgcttcttctgccgcggttcccttcattgccgggagctcccgccgccagttcctgggggctacggcggccggcctggctacggcggctctttccggatgccggggcgacgccgcccagaggctggaccccacccagtgcgttcttcctcccggagccggttccctggaacgttttctggatgtttgcaccggctgccagatgtgcattgccaactgccctacccatgtgctccagcccgcctatttgcagcttgggctgaaagggttcatgaagccccggatggatttttccaccaagtattgtctgtacgactgccaccgctgcgcggaagtctgccccacaggagccattcgcaggctgcccattactgcggagagggataccgcggaaattacgaaggataccacgcgcatcgccgtagcccggttttacgtctgccgctgcctggttgcccgggaggacatggactgcggcgcctgtacggagcattgccccaccaaggccctttatacggtgccctacatcgggcgggacggccaggaacaccgcctgcccaggctggacccctccctgtgcatcggctgcggcgcgtgcgaacatgcctgccccgtcaccacggaacggcctgaggaacgcgcgcgcctgaatacctgcaacctgtgcgaggaaaagtgcgagttcaaaaagcgccgggaaatgccgccccgcgcgctcgtcgtccgcgccgtgaatccccagcagaaagccgtgaagaagtttgaggaaaaggccgtggacccggtgggcgatgcggacttcccgttctgaatagggtccgtgaaggccgggatgcctgttttgtccacgcaatgggcggccccattcccctgtgttgcctgatgctcgcgctgccgggaacaagggcctccgggcccttgaaaaaccctttcatcatgaaaaactccgaccattcttttacttgcatgtgcaggtaaatcattgatggtcaaattgcggtaaaaaagttaagtctatgtgggaatggatggaaagtgaaattcttgaattcgtgatggacaggctggcggatgccttcagcctatcgcccctctatccggaggaatggagcctgatgcggttcatcaatgcttttctattggtgtgcgccgtggcgtttctgctggctgcgggggcgctgggatggtctcccttcctaattgcggcggctcttctgctgataggctccatcacccggctggctgtgtggaagctgatggaatgagggcttccggcgccctcacgccttcttttccagaaacaccgtggtcatccctccggcctctttccggtacagttccgtatagcccagtttgaggtacagatacagggtttcaggagtatctgccgaagtgaacagaaggtaggcggctgcctgtccgcggaagtgttcttccagggcaagcatgagttgctggccgattcccctgttccggcgggccgggtccacaaccagcttgccgacatggcagacgtttttgccgtccagacagcccctgacggagccgacgatgcggctgttttccgtatacttgaagaagacgctgttccgcgcctcttcccgcaaatgttccagggtttgttccagaggcgggatgctggcgagtccaagccgctccgccacttctccgaaggcgagtaattgaagcttcaggattgccggaaaatcttcccgggacgcttgccggatcatgcctccatcatggttccgtagcaggacggaagccatgaaaaaaagcggaatgtcatttttccggagggtccgggacgatgcctcccagcccgatgcgcatgttcagggggtggcgtatgacggttgggcggccgatgtattttacacagcagcttaaagtagcgggagagtgcggaaaggaataggtgatgagctgcgcggtttcatcctccgggtccttgttggacatgatctgcatgcccccttccacatggaagccgctgaaatgcggatttccatggtgacccttcaacttgaaggtggcccggaattcctttgctgagggcttgatgctgaggagggtggcctgaacctggaagggaggataatctccggatgcccccggaacgtcgatcgcccattgtttgcccggttctgcggaaatcgtccgggccggagttgtccggacctctccggccggcacgcggagctccccggtcagcagccatcccttgtcgccgggaggcagtgaacggggaagagggaaaaaaagcatattgtaggtggaagtgccccatgtggggggatgaacccggcagtgaacggctgtttttccgccgggggtggaaaggttgatgtaactggcgccctgctgttccatatcattaagcagggcgtggtttttatccgtatgaatgtaaatgccgaggaagacgggttcatggccttctttatggaaaacccaattgtataattttacctgaagagccggtgacggttgtgcggagaggccggattcatggttgttcaccgcttcccggggagtggaaggcggagagagggaagggttcacggccaggtcaatgggaacatccagtgaatgtttgcggggaaggtaaacgacgccgagattcaattcacggggaagggaaggggatggttttcccgctccttcttccatttcatgcaggcaggaaatgctggttttaccatctttatgttctgtgatttccggcgtatgggcgcgccgcaggcccggtatggggagtccggaggaatccagaatggcaaagccttgaatggaagcggaagaggggaattccgcctcgcaggagagggtggtccgctcttcgttggttttcagctgaatggaagcagtgttgctggcggaatcggcccgggcgatgtcgctgtcctcccggacgttcggttccggaaggtccagataaaaagtctggggttcttccgccggtttgaccgtttgcttcagcatcagccgctgcggttccgggcagaactggacggtccaggtcccgcggatgcgcagccattccgattgaggggccggaagctccctgaatccgcaggagaattgcagggttttgtagggtgaaccgggagaggatgatgagtgggacccggtgacatgggaaggattgagcttgccgggcgttccccatggctgatagggattgcagggtatttcttttccggtggaatcctgcatggccaggcgcgtgagctgcccttccctggaagaaggaatgacgaaggttcctttgccttgcagcatgatggagattccgagatggacatggccgggttcgtccatataggaaatgcgccaatcatccaggacggcggtaaaacggggttggtccgcggatggaggccgggcggcggccgccaggggggccagcaaggcggctaaagcaagaatgcgggggaaaaccatttgattttaattggggaaatgccttaaagggaaagtttttgaataacatattcttcgtttacggcaagataaaacactgatgcccgattttccttgatgatgcggaagttgatacgctagagtaaaagaaccatgttgcaggcggacggcattacatatgaaatagaaacaccggatggtcctttgaaattattggacaatgttagttttaatgtgcctcgcgggcattttatggctgttgttggcccttccggttgtggaaagaccaccttgttaaaggcgattgcgggcatgattgcggaaacggacggacgttttttctggaacggccatgatttggcggaagaggacttcgagccgtcggaaatcgggttcgttccccagttcagcattgcctatgaccagttgagcgtggatgagaacgtggagagcgccgccaggctccgctgccggttcgattccgtggacgatttggacgacagcattgacaatgccctggaggtaacggggatggaggggattgcggaccgggatgtgaagattctttccggcggccagaagcgccgcctggcgctggccatggagctggtgtccaatccgcgcctgctgatttgcgatgaggtgacgtccggcctggacccgaggtccgagcacgatattgtggacctcctgcatgaaatctcccgttcggaaggccgcatcgtcatttccgtcacgcacagcctttcccacctggacatgtatgattccatcctggtcatgcaccagggctgcgtggcctatcacggttctccgaagacgatgctgcattacttcggcgtttcctcgctggaagagatttatccgaagctccaggaccgtgaaggcccctcctggtgccgttcgtggggcaagcaccgggattcctattattcccgcctggaacaggaaagggagaagaagattctttccggagaattgccggaccctgatgccgtccgcagcaacgtggaggcggagaaggctcccgaggaacccggaacggaaaagggggacgccgtgcggagcgattccggggaaactgcgcctgcggaagggaacgggaattccccggaggccgcggcggaagccattccggaggttccgggattcttcacgcagttcttctgcctgctgggacggcgctggcgcatctttttccgcgaccgttcccagttggttcttcaactggtgatggtgctgctgttcccggtgctggtagccatgttcacggacaaggggaccgggcagatcgtgggcctttccgccacgcaggacgtccagaccatccagaaggacatggaagcccagcagttgaacatgaagacgggttccgccgtctccggcatcatcatgttcgaggtgattctgctgggcctgatgggttccaacaacgccgcccgggaggtggccggagaacgggccatcatggaaaaggagaaatacgcgggaatgaggccctccgcgtacctggggagcaagctggcctacttgagcgttctggtgctggtgcagtccgtctggatgttcgcctttgtggacttcttctgggaccgcggcgggggcctgacgcacctgctgttcctgattctggcggatgccgccatgacctttgtatgcctgggcatttcctccctggcccggagtgcggaccaggcctccctcctgagcatttacctggtgggcttccagcttcccctttccggagcggtgctggcccttccggaacaggtggagggcttcatacggcccttcatttccgcatactgggcgtggtccggcagcatctccgccctgaaatctgacgtgtacaacgccgtcaagaatgtgctggatacggacctgacgcccgcgctgacctgttacattgttctgggcgtgcatgttgcatgcggcattgcggcttcctacgcgggaatccgccgctcgcgctgggagctgtaatttaatgcgtgcacttgcacggagttcgttatatactttttccatcaaaagttatggcgagacgacgtgcagcaaaaaagaagagttcctcatcatccacgccgatgctgatggccggcgcggctgttcttgtgctggccgtcatcgtggggtttgtcgtgttccgtgccagggagaagccgcaggcggggtcggatattccgctggatatcctggcggcgaacgcctcccagctttccaataacaactatgcgctggacggaacggtgatcgaccgttttccgcgcggcgagtccgagctgatttcctttttgtacagggacgcttccggtcgtgagtacattattcccgtctgtgtttctgcggaagccaggaacggactgaacatcaaccgggaccagcaatacagaatagagttccgggtggaagacgtcaatccgaaggtgcgcggcgtatgcgtagccacatccattcagcctaaatgaacaaccttccccgccccatgaaaagctgctttctcctgaccctggcctgcgcggttcccgcattggggcagatgatgtacaatccccccgcttccggcggcggtgcgcctgccgcgcccccttcctccccgcctgccgcgcagccgaatgcctaccagccttcccggcagggagatgccaagtccctgtacggcaatgaaattcctttcctgaatccccaggacggcaccgtgaccatcaacggaacaacgctgaacatgggcagtttccgggaaattgaggcgcgcttcaataagtacctgagccagccggaggaaagcacggaggatgcgaaggagtaccagaagatttttgaaaagcttcatgagacgctttccatgcgcaaggaaaagctgatggcggacaacgtggtgcggcaggtggtggacctgctgaccgccgcttccagcaatccgctggacggtggcgtttccgatgccctctgccaggctatctacaccgcatggcaggccaagagcaatggaaagaacaaggggaagatgcttgaagcgatggagagggaaatacgcagcaatgcccagaaaatgagcctcatggagagcggcgtgaccaccagctccggctctccctccaaccagaagggcgggaaaaagggcacttctgccaataatccggccaagaacaacccacgctacaagtacctggaaaagcgcatggtggaaatggaggcccgcaagctgaagctggagagtgaacaggtgctgacggtgacggaagcgaagatcgttttccagtccacgctggttcagttgttcgcgcagcggcgcttcgaccatgtttccataggctgcggcatttacagccgcctgttcaatgacggggataccaagctgcggctggacaagaattcggacgccgccaagatgttcagcggaacgctgggcaccccgcccaccgtcgccattctggacaacctttcccgggagctggcccgtgattccgaccgccacatgaaggccgtgaacaacctggttgattcccatcattacgtggatgccctggaacggttgaatgaggcgctgctgatcggggagttcatgcccgccgtgaacacgttcccgtatgaaaagaagcagaagctgtacgccttcaagcgggacgtggaaaagctgtttgagctgatgaacggcaaggattacgaggaagccctcaccctggtggaaaacctcaagaagacctcccgggatttcagcacgggccgtgcggaatccgccatcagcgctgccgtgttcgccagtgacgcctatatcgcccagggccaggaagccctcgccagaggtgaccgggccaagctggaggaatgcctgaagagcgccattgaaatctggcccaagaacccccgccttcttccgctgcggaacgccatgatggccgccggtcagcagtcccacgcgctggaggacttcaagcgcttccacaagaataagaattaccgccgcatctttgacaaccagcatgaattcgccgttctggtgaaggatgatccggaactccagaagcagtttgtggaggaccttggcaagatggccgttattgaacgggctctgggcgcggcgcgccagcgcgaagccatgcaggacgtgtacggcgcctgggaggaactccagcagctccgttccaaggaccaggagctgttcatcaatgaccaggaattgaacgcccagtatctggacctgacgacgaaggcgagtaccctggtgaacctgctgaatgatgcggaaaagtgcaggaacgcgggagaagtgggttccgccctgggcaagtacatggaggccaagaagctgtacctgtattcccgctttgccaaggaaggcatcgaatccctgttgaacgaggttcttccgctgaactagggaagttttccgttcagcggtgcggctgcggagacggagtatttgctttttttccggagcggcgccgttatgctacggcccatgaaggcagtatacctgtgtttgtgcatgctggcggcgttctgtttttcggccgcggctcttcccgcggattgcagccaggtgattgtgggttccgcggacggctggaacagctcccatgtgcaattgagccttctggagaaggggccgcgcggctgggtgatggtgaaaggtccgtttccggcgcgtctgggaaaggccggtctggtgtggggcaggggcgtcagcatgcctccctccggcggtccggtgaagaaggagggggacttgcgctctcccgccggcatctttgagctggggggcgtgtatggcaccgttcccgttccgcagaagaagcgttccatgccgtaccgccgcatcacgccgcgggacatgtgggtggatgatcccgcttctccgctgtacaaccagcacttcgtgctgaagcatgaccccgtcacgccgtgggagttcaagcagcagatgaagctgaacgattacgcccacagcctgaaactgttcatccggcataatgccgcatccggacgggaaaaacccgtgccgggggccggttcctccatcttcttccatatctggcgcagggatgggggagctcccacggcggggtgcaccgccatgagcgaggaaaatttgagagccatgatcgcatggctggacccctcccggcatcccctttacatcctgttgcccgccaaggaatacctgcgcctgcgcggagcctggggattgccgtgacggtcatggtccttttctcattccgtcgccgggaagggggacacggggcttcaagtttttccagtccgtggcggcataggcgcaagcgtgtgggctgcatggttttgcacgtttttgaccggggcgaggccgaaggttttccggaaagagaaggcggagggcgaaagaggattttgtgaaagagggataaaacgcgtcgtcctgtaaacgcaagaagccggcctttttccaaaggccggcttctgcatgataaaacggttattgttcctgggcctggggagcggaagcttccggctggagcaggggagtggaggtttccttcacttcctccatggaaacttgttcttcctggggctcgcgggtttcgcggggctgccgggactgttcctggcgttcattggcgccgctgaccagcaggttcctgcccatgaagggctggttgtggaggatgtccacggaacggacggcatcttccatcttcttcatttccacaaaggcatagcccttggacttgtgggtgcgggggttgtaaatgatttccacggagctgacttccccgatgcccttgaatacgtcttcaaggtcgctttccgtcgcttcataggaaaggttgcccacgtaaagcctgcggttggagacgggctgcttgggagcggaaacgcgctcctgcctgttgcgggccacgcgggtattggttttggcggcggctttatccctggcggcgggtttgttgttcttggccgggcggatgccgaagaggcccaggaaacgctgccacaaggagagtttggcaggtgcttcttttttatacttgggacggtagccgctggaatcccggcggtcattgccataggagcgtccgcccttgttatagcggcgacgggctccctggccctgtcttccctgtgtgttgtgctgtgacatacttatattctaagttgatgattatgttggtgtcatgccggatttatcgctgtacgcagtaagttccatccggaaaatcgccgggacgttccgctaccatgagaaaagccaggagtaaggatgccccgtgccccgatcaacggtccatgcgtggtctgataggggggcgatcaggctaggtgcggtaccagtccggtcgattgacgcgtataccaatgcacagggagccggattcttgcaagccggtataccgtcattttgggctttccgcccgtccggagacaggaagaccgtccggaagggcgcattattccgggcggaaagcggcagggtgagcatgcaacttgacaaaaagaccgggacagcgcactttaagtgccgactaacttacactctctctcgatgctgattcaaaatgcagaccgtactacctacgggatcaataaaattgtcgtttccatcctcgcattcgtcatcttcttcgttgtcgggttcgtttcgtggcaatggatgggggtggctccggaaccgtggcggctgcgcacgctggtgctgacgccgctgacgatgtccctgctgctgtatgtctgctgtgaccagctgggcgtttactaccggtgcatgacgctgggcggaagcatccggcggtttgtcatggcgtacgcctgttttgtggtgttgagcatagtgacgtggaagtactttgttcccttttccgcgaacattattgtccagaccctggcctatctgctcacgttcctgggcgccctctggctgcgcatcagccggttccgggcggaaaagaggctggtggaggaggcccccacgctggtggtgggcattccggaccatgtgaaggagttccgcaagatgctggaaagcgaccatgtggacttcaaggatgaactgctggtgatggctccggaagaggtggaccgcgcggaagtcaggaatttgctgatcaagggctgcatcagcaaggtggtgtttcttccggaggaggtggactccgccgtggcgcggtgcctggtggagctgtgcggcaagatgggagtggatttttacgcgagcatggtagtgagcatgcccgacgtgcataaaacctattttggcgtgctgggaggaaccagaatgctggtgtacaagtccacccccattccctacaccacctcctggcagttgaaaaagatactggactgggtgggcgcgctcctgcttctggtgggcacgttccccctgtgggtgctggcggccgtaggcatcaagctgtctgaccgcggtcccgtcttctaccgccagaagcgttccggcctgtatggccgggaattcggcatgtggaaattccgcaccatgtaccgggatgcggacaagaggctggatgaggtgaaggccagttacggcaacgacatgaacggccccatcttcaagctggagcatgaccctcgcatcttccccttcggccgcttcctgcgcaaattcagcatagacgaacttccccagctcatcaacgtgctgaaaggggaaatgagcctggtggggccgcggccgctccctgtttatgagacggaggcctttaccagtgacgcccaccgccgcaggctgagcgttttgcccggggtgacggggtactggcagatagccgggcgcagcaacatccgggaatttgaaaaactggtggagctggacatggagtacattgacaactggtccctgtggctggatgtcaaactgctcctgaaaactgtcccggcggtactgttcgcccgcggggcgaagtgacgctccgcctttccccgcatccctgaaatgcaggccggaggccgtcgtttgcaacgggatttggagggggctggcgcctcgtggccggccggtgcaggcccgtttttgaaaggaatgcgggcggctggcaacgggtgcttggaatatttggttgaaaatgaagaaaattgttgcggggcggagactttaaccttgaggtgcggaaagggatggggcagaatcagcccactatggatttagttcagcgagaaatctctaaagaaacggtgactccgtatttcatcgagtatttcggtcaggagccgactcacgtggctgcggcgccggggcgtgtgaacctcatcggtgagcacacggattataataatggctttgtgatgcccatggctcttgataaccactgtgttgtggctgtggctccctcccccgtgggcaagcaccgcttctgcggctccctgggcgaccagatccatgaaattgcggtggaggacgccctggttcccggcgatccgttctggtccaactacgtccgcggcgttctggccaacctgcacaggcgcggcgtagaaatcggtccggtggacatgctgattgacagcaacgtgccccgcggcggcggcctttcctccagcgccgctcttgaagtttccgtctgcacggcgcttgccgctttcgccggggttgaaattgatcccaaggaagtggccttgatcggccaggccgtggaacatgaattcgtgaacgttccctgcggcatcatggaccagtttatttccgccaacggaaagaagggcatggccctcaagctggactgcgccacgctggaatatgaactggtgccgatgaacaacgagtccgtctccgtgctggtgctggacagcgccgtgaaacactccctggcggacggagcctacggccagcgccgcaagcagtgcgaggaagcctccgccatcatgggcgtgccctccctgcgggaagccacgctggagctgctggaatccttcaaggaacagcttggcgacgtgcgctaccgccgcgcccgccacgtcattggtgaaaacgcccgcgtaaacgcctttgcgaacgcccttgcccgcggcgactgggatgaagccggcgtagccatgcgcggcagccacgcctccctgcgtgacgattatgaagtttcctgcgcggaagtggataccctggtttccctctgcgaccgcattccttccgcatcctccatttacggcgcgcgcatgacgggcggcggcttcggcgggtgcatcgtggccctggtgaagacggaagacgtggacaaggtggcccgcgagcttctggacggctactgccaggaaacgggcattgaaaccacttaccttgtgacctgtgccggagaaggcgcccgtgtcctgtaccaagcttaatccatactgattatgagaacactagcaaccatattcggggctctggccctgatgacgtggggcgtttccgcccaggagggctccgtgcccgcaccggcggctgatgcgcagcccgccctggccgctccggccgtgacccccgctgcggaagcacagccggctgcggaacttcagccggcggcctccgccgccgttgcctcccaggcagctccggaagcctccgctgaacccaagacagcccccctttccataacggaagtcatcctgttctgtgtggttgtggtgggcgtaatcgccctgggcatctggaaaagccgtgatcctgaggaaacggaggaagaaaagaagaccaaaggcgcttcagactacttcctggccggccgcggcctgacctggtggctggtgggtttctccctgatcgccgccaacatttccacggaacagtttgtggggatgtccggcaaggccgccaactgggttggcatggcgatcgccgggtatgaatggctggccgccatcacgctggtagtcgtggccttctgcttccttcccaagctgctgaagggcggtgtatacaccattcccggattcctggaataccgctataatacgctggcgcgttccctgatggccattgctacgctgctgattctggtgggcgtgccgactgcgggcgtgatttacgccggcgccaaggttatctccgtgttctttacggggtacactgccatgggcattgacttcggcaacatcaccgtgggctgcatcatcattgccttctgtgctacggtatacgtgttcgtgggcggtttgaaagcctgcgcctggacggacctgttctggggcgccgccctgattgtaggcggcggcgtggtggcatattttgccctgatggcgctgagcggtgcggacccgaaccatctggtgcagtctgccgccgccaattccggcgcaacggtcgcttccctgggaaatccctcggacagcctctggcacggggtgacgcgcttctttgaactcaactccggcgatgcggccagcggcgtgaataccgtgggcggcaagctccacatgatccgccctgctgacgatgcggaaatcccgtggacggccctttgcctgggtctctggattcccaacttcttctactggggcctgaaccagtacatcatgcagcgtacgctggcttccaagtccctggcggaaggccagatgggcatcgtgttcgccgcgttcctcaagctcatcattccgtttgtggtggtagtgcctggcattctggcctacaacctgtaccgcaatgacctgaaggaacaggccgaagtgaagtacgcggcggaaatccgcaacgcggaagaccccgaggccgtccagggccgtcccgtcatctacaagcttacggacagcttcctggtggaaaacgtggaagaaggctgcgcccacgccctgcataacgcggaggtgatgaaggttggcggcgaggtcatggccgaattgaaacaggcctgcgccgatctgaaggcggatgccgccaatgaccagactactctggcggaacgcgctccgttcgtggaaaagatcgcctcgcttaacagcaagatcatcaagccggccgtagacaactcggacaactattatctgacggataccctggtgggctttgactatgactccgccttcggcacgctgatcaggaagctgctgcccggcacgggctggacgtggtttgtgcttgccgcactcttcggcgcggtggtgtcttccctggcgtccatgctgaactccgcctccaccatctttacgatggacatttacaacaagcttcgcaggaacgcgaagcccacggagcttgttactgttggcaagatcggcctgctggtgtgcgccgtgattgcgctgtgcattgcgccgttcctggacagccctgctttcggaggaatcttcaacttcatccaggaattccagggcttcctgagtcctggtgccctgtgcgtgttcctcttcggcttcttcgtgcccaagtgcccgcgcatcttcggctggctgggtattgtcatcaatgccctcctgtacggagccttgaagatatggcagccggaaatggccttcctgaaccgcatggccgtgtgctttattacggtggtgatcatcggcttcatcttcacggcagtgaacgtcgcccgcggcggacagtccatcgtgctgcccgatagaggcgtggtggccctccagtcctcttcacgcgccaagatattcggctggttcgtgattgccgcgacggttgccctgtacatcatcttctggtgacggacaggggcgttaagcctgtgtttttcaatccctccggtccaggccggggggattttttgtgcccggaaaggaggatgaacctgccctgaagcccttggagcggaaaaggatgtcaaaacggatgacaaatgctttcttgttgtatctaaacgaattgcgtgtgaaattgaaaaaatgggacttttttttcatctatcgtgtgaacctgggaggcgggttcgagtcaaatcccttgttgatcgtcaatcaaaggaaagacgtcaacaggatataagcaaacggaaaaactccatctctgttgatgatatgaaaatgcgtttatgtataatgtcgctccttgctctcctgtgctccgcaccgggatgggggaaaacgacaatggtttcgttcggcgaaagttcgaacacctattccgctccgtggggattggcaagcggtacaatgacaagtggcaaccgcacgaccggcaattccatgaaagctacggacggtacggcgtccgcgattcaggttacgtataacatctccggcggtctgctcggaggagtgcaggctaccaacagcaacatgtacggtacgcacacgatcgggaccggcggcctgaacatgtggaagcaggcttacggctatgacctggatgccgccaagaccacccgcgggtggaatgagaccctggttcttggggtgggaggcctcgtcgcccccggtgacgttagcgtcaccggatttcaggccaatagttcctatacgatgtcttccgtgttcaccataagcggcttggcaaatgtggccacgtggggaacgaacagccccgtgaacctgaccggtactggtatcaacgtcaagaatatctatctggccggctccaacgggcaggtagtggatctgcttcacatcagcggcggtagcctggctaccctgctttccagcggtacgttcatgctgacctggcagtttgaaaccaattcttctttcaatcccagctcttcggtcacgatggacttctccgacagcctgctttccctggccggcgactacggaatgtccgccctggcagtcagggacggaatgccgagcctggctgttccggaaccggccacggcttccctcagcctttttggactggcggccctgctgatgcgccgccgccgttcccgctaaacctgtcccggtaaaaaataactcatggtttaaaggcagccggtgaagcacccggctgccttttattcatcttccagaagcatgctgcggagggagtcgaaaaagtttccggactcctcttccgtcgcttccgcattcatgagatcctcccatttggaataatccatcaggtggggaggaatttcactcaggaaagaggaacgctggcagggcatgcggtccccgtagcgcaggcgcgtggcgcaataggtcagcatgagtttttcctgggcgcgcgtgatgcccacgtaaagcaggcggcgttcttcgtcacagttgccgtcttccagggaacgcttgtggggcaggatgccttcttccagtcccacgaggtacaccaccgggaattccagccccttggcggcgtgcatggtaatcaggcacacgccgggcttgttctccacgtcgtcgtcattgtcctccttgtccagagtgacctgggccagatagtcccggagggtttttccgggctgccagaagttgcggagggaggctttcacgtccccgatggataccagccgcttctggatttctgcctccgtcttgcacaggcgcgtgacgtactcgctgaatccggtttcttcaatgagctgttccagggcgtctccaaaatcggtctccttatcctggaaaaggtcgatgtatctggcaatcaggtcgttgaactccagcacgctgttgcgggcgcgggtggagagtgtggccaggaattcgtcgtcctgcagggcggcccatacgctgttgccgtgttcccggctccagtcgatggccaggtgactggtcagctcgctgatgccgcgcgggggcgtattgaggatgcgcagcaggtattcgtcagcctgcgggttttcaatggtcgccaggtaggaaatgaggtccttcacctccttgcggtcaaagaagctctgcgcccccaccatgcggtagggaatcttgtgctcccggagcgtctgttcaataatgcggctctgggtgttggcccggaacaggatggcgaaatcctcccaggggcgctcctcctgcctgcggacgttttcaatgtccgtgatgatgaactccgcttcctccgcgtctccgggcatggaaatcagcctcactgcttctccgccgcccttgtgggcgcgcagcgtcttgtccctccggcccaggttgtggcggatcagggcgttggccgcgtccaggatgggggcggtgcagcggtaattctcctccagcttgatgacggcggggttcgggaaaaagcgttcgaactccaggatgttgctgatctgggcgccgcgccagccgtagatggactggtcgtcgtcgcccaccacgcagacgttgtgcgcgggacccaccaagtgtcccagcaggctcatctggaggctgttggtatcctggaactcatccacggtgatatagcggaagcgctgctgccacgcctccctgacgtcccggtgctccttcagcagcttgtccgccagaatcagcaggtcgtcaaaatccacggaattctgcgcctgaagctcccgctggtaggaggcggcgatgttggccgtcaggttgtcttcaatggaatccaggcccaggccgctattcttcatccggctcatggcggacagcacgtccttgggggtgattttttccgtgatgccgccgtggcgtacgatcaggcgccggatcagtccgctctgctcggaaccgctgtaaatggtgaaattggtcttgtaccccagccggcctatgtcctcccgcaggatgcgcacgcagagggagtggaaggtgctcaccatgatctggcgggccgccttccgttccaccatctggcctacgcgctccctcatttccagggcggccttgttcgtgaacgtcacggccaggatgcttttggggctgatgccgcggtccaccatgtgggcgatgcggcaggtgacggtgcgcgtcttgcccgttccggccccggccaggatcagcacgggcccctgcagggtctgtacggccttcctctgggccgcgttcaggctctccatggaaaaggacttggccatttacacgtcaaaatggatgtctttcaaattcgggtggccggcgatgagctgggagatgttcatgcgcgtacttccttcaagctggacgttcgtcaccagcaggccgccgcttccgcaggcgatcagcagcccctgttctccggcggaaagcacctggcccggtttcccttccgcctccggaacgatggagaagccggggaagattttcatgttgcggatacgcttcttgcggttccagtaattggtgaaggtgccgggccacgggtcatacgcccggatcatgcgtccgatttcctctgcggggcgcgtccagtcaatctttccgtccgcacgcaggagcttgggagcgtacgtcgccaggaattccttctgagggacgcgtgtggcggttcccttttcaatggcgtggatggctgggagcaatacgtccggcgtcatctgggccagcttgtcgtgcagggagccgccggtttccgtgccttccagcggggtgctgatctgggcgatgatgtccccggcgtccagctttttgacgatgtgcatgatggtgattcccgtctcggaatcgccggacttgatggcggactggatgcaggccgctccgcggtggcgcggcagcagggaggcatgggcgttgatgcagcccatgggcgccatgtcaatcacttcctggctcagaatctgcccgtacgccatgaccgcgatcaggtccggattcagccttttaaggttgatcagcgcatccggagtccgcagggagtgcggctggagcacgggaatgcccgcttctctggcaatgttcttgatagcgggagccgtaagcacctggtgcctgccgacggggcggtcaggctgcgtgaccaggcctaccaggtccgagttacggaccaggctgcggaaggcgggaatggcaatgtcgcctgtgcccatgaagacgatgcgcatggctgaaagcttgccctgacggcctgcgcaggtcaatgttaaatccggattcgggaggggaataatggtgtgcaaatgctgttttgcggtccttttccgtccgcgggccgcaggggcctttcggcccttgcagacaaaacctcttcgattcattccggattggatccaatgatgaaggccgggaggccttcattcccggcagggcgttttcacgcagtccgcgggaaggtgtttttccgtgtttcccgctggctgccccgccgggaacaaggctcttccggcccctgccgtcaaggcaggcgctgcgccggatctgccggaagaagctctgcgggcgtgcccgtcttcctgcaagaagttctttccgattgactggaatactggtatatcctgtcccatggagaagagaaggctgccgcgaattctgatcgtgactgcgggatacggggaagggcacaattccgccgccaggggtgtgcgggatgccctcgcagggcgcgcggaagtccgcgtgacggacctgtgcgcggaggcgatgccccggatgttccgcctgacgcgcgccgcctacctgtggattatttcccgcctgccccgcctctggaagctgatgtacgaggtgagcgacaagcgcaacctggcggaaaaacccgtcaaggggctcgctcccgtggagcgttttctggaacggctgctgcgggattggaagccggacgccgtggtctgcacgtacatggtgtatccctacatgctggattccctggcggcccgcacggggaacgcggtgccgtacttgaccgttgtgacggattccttcgtcatcaataagtcctggctgtgttcggagtcccccctgtgggccgtgacggacccctggacgcgggaaatcatggtggagaaggggcttcctccggacagggtgcgcgtcacgggattccccgtcaatcccggcctgggggcgctggcgcgggagcgccccgtttcctggaaggcgggcgagccgttccgggtgctttattttgcccagcgttccgcacggcatgcgcgcgcggagctggaggccatgctggaggcggacccctccatacgcgtcacctgcatcctgggccgccggttcaggcgcatttacccccatatccgggatttgcgcgccagatacgggcataggctggccgtgcgcggctggacgcgccgcgtgcccttctatctcgccgccagccatgtggtggttgggaaagcgggaggggccaccgtgcacgaggtgctggcgtctgcacggcccatgctggtaaactttcttcttccgggccaggaggagggcaacgcccgcctgctggaaaaactgggcggcggccgccatgtgccggacgcccgtgccctggctgccgccttgcgggagatggttgaggaaggcggtgcgccgtggaggcgcatgcatgaaaatttggtgaaggcggagatgaccgggggaagcggcaagatagcggatttggtcttgaaactggcggaggaacgtactaactgatttccgtgacttatctgctgatcgacaattccaatacgcgcaccaagttcgtgctttccacgccggacgccctgctgccggaacggtacatgattcccacccgggaggtgagcgaggaacggctggatgaagtgctggccggcgtccattacgatgccgccgtggtgtgctccgtagtgccgcgcgtgggggaggtgctgaaaaactggataggcaagccgtgccatttcctttcctgcgattcccggctgggcgtgggcatcgactacccccacccgcgccagataggagccgacaggctggcgaacgccgtgggcgccgcggcctattacggctgcccgtgcgtcgtggtggacttcggcactgcggtgacctttgacgtgatcggcccccaatgcacctatctgggcggcgtcattgctccagggcttgccagcatgggggattacctggagcgcaataccgcccttcttcccgccatcgacccgcaggagcccgcccatgccattggaaccagcacggtggaggccatgcagtccggcgccgtgtacggctaccgggggctggtgaaggaaatcctggcccggctggaggaggagctgggcacgcgcccggccgtggtggctacgggcggggacgccgcgctgatcgccaggggcgtggagcgcatcgaccatgtggacccggatattacgctgaacggtttgcggatagctgccgtgcttaatctttgaagaacgggcaacggcctggccgggagcttgttacttccggcgagggggccggatgacacgtaaaaactcataaataggtgttgcaaattgcgtataccccatgtagtatccatgaaccttaacaataaatatcatgtctgacaacagcatcgaagaaaaagtaagaagtatcatcgttgagcaacttggcgttgaatccgataaagtgactgctgatgcgaaattcatcgaggatctcggtgctgattcgctggataccgttgaactcgtgatggctttcgaagaaaactttgacatcgaagtacccgacgaagaagctgaaaagcttcagtccgttgccgatgtcgttgcttacatcgaaaaggttcagggttaagttgaactgctaaaaatcctttattacaaaagcggcttccctgtccaaggcaaggaagccgctttttcatggaaagctcccggcttcttcttccatgagtgatctgccctccttctcccgtgacgatatccgctatgcggcggaaatgacccgggtggtttatgaaccggaccgccgcattgatacctttggcgataccaggttcaatttccttctcctcagcgagctgatggatgaagcgggcgtggtgcgcgtgcgcagcggctgggtggaggcggaaaagccgaagatcatacgcccttccgtttacaatgaagtcagtacggagggcttttccggagaggccaagcgcttctttgactggctttccaagaacggaccgggctttttgacgctgctggaatacggcttcaggttcaagaggtcggaagtgaatgaggaaattctgcatgaaccccttgatgccgtgcgcggccgtctgctggaccaggtgcgcaacggagaggatacgttcatggccctcattgaaggggtggatgacgcatgggaggtctccctcttgaaattcaccgtggaaatgatacaaaaatcccatgagatcaatatctttgacttcaagcgcaagggtcttctttagccttctggcggcggcctgctgcgcccagggagtttttgcggacggggagaactattccctctggccgcgccgtccggaagccctggcggaagcccggcgcctgatggaccgggggagcctgccgcaggctctggagctgttgcagcccctggtggagcagggcggcgtggtggggagggaagcgaaggatctcatcggcagcctgcgcatccggcaattgctggaccccaacgggccggatgtgaagaaatacaccgtacggagaggggattcctggatacgcatggtcaggaagctggactgctcccaggccatggtgatgcacctcaacggcctgatggacattcccgttctgcatgcgggggatgtgctcaagtaccgtcccctggattttcatgtagtggtgaacgtgccggagaaggaagtctgcctgtacgacgggacgaattttgtgaagggctatcccattctctccatgaaggacggaggaaaaaagaatttggagacgtccgtcaaggacgagcaggcccctgtttccatttacagcaagcagtttccctctgcggacaaaacgctggtgctggcggcggggggctatgtcattgacgtttcccgcggagctccccgttcaccgggcttttatttgagccggcaggactgcaatgagctggccatgctgacccgtgcgggcacgaaggtgaccattctgagggagaagggagcggcgcagtgaggctggtcattcaacgcgtcacggaggctgccgtgcacatcggcggcgtctgtgcgggaagcacgggtccgggactgatgattctggcgggcattgaagaggcggatacggaagaggatgtgcgctggcttgccaaaaaggcggcggacatgcgtattttttccgatgcggaggggaagatgaatctttccgtgaaggaaatgggggggagtgccctggtggtgagccagtttacgctgcacgcctccaccaggaagggcaacaggccctccttcatccgcgccgcaaggccggagcaggccgttcccctgtatgaactgttcaagagggaactggcgtccttgctggaaggcagggtggaaagcggcgaattcggcgcggatatgcaggtttccctggtcaacgacggtccggtgaccattttcatggattcccgtaacagggagtgacgggaggggtgagagtggagagtggagagtggagagtggagagtggagagtggagagtggagagtggagagtggagcggccttgcggaatggggactgcctccattcggaagtgacagggccaataaagggaagccgtaccgcttttgcgtttggcgcgtataaggcgcgctgtgaccagccatgaatacttgaaaagggttgaaattggttgaggaagcttgaaaatacaggcttccgctccggaatggaagggccacggggcaattgaagaaataaatgcctgaaaggggccgtcttgaataattgaaaggggcatttgtcccattggggacacttcacccttttctttccccttcctgatcttttcagccatttaagggcctattcttccgtccatttatggttggttgcagcgccgtcttgcggaaagcgggaatgcttcacttgccccggtttctgtctgttgcgcaggtttgcggcgtttcccggagcaataaaaaactcccggcgggcacgagcgccgccgggagttctgattaacgttttgaaaagggggcccgccttagtaggcgaggccttccttggtgttggccacgataaagtcgcggttgaggcgggcaatgttgtccacgctgatgcccttcgggcaggcggcttcacattcatactggttcgtacagttgccgaagccttccgcttccatctgcttcatcatggccaggacgcgcttggtgcgttccggctggccctgcgggagcagattgaggtgggcgatcttggcggacgtgaacagcatggcagaggcgtttttgcaggaggccacgcaggcgccgcagccgatgcaggcggcggcatcaaaggcggcttccgccttcactttttccacggcgatgttgttggcattcggcgcggagccggtgcgcacgtcgatgtagccgccggaggcgataatgcggtccagggcggagcggtccaccatcaggtcccgcaggatcgggaaggctttcgcgcggaagggttcgatccagacggtatcgccgtccttgaacttgcgcatgtgaagctggcaggtggttacctggcgttccgggccgtggggaatgccgttgatggtcagggagcacatgccgcagatgccttcccggcagtcgtggtcaaagtggatgggttccttgccttccttgaccaggccttcattgacgatgtccagcatttccaggaaggaggcgtccaccggaatgtccttggcggcataggtctcaatgcggcccttggcttcccggttttcctggcgccagaccttgagagtgagattgagtgttttagccatgttataatctttcttttaagtgttaatgtattggctatctttacttgtagctgcggatggcaaggtgcacgttctcgaaggtcagcggttccttgtgaagaatgggcaggctgtccacgccggtgtattcccaggcggccacgtaggcgtattcttcgtcgttgcgcttggcttcgccgtccggcagctggtattccacgcggaagtgggcgccgcaggattcctggcggttcagggcgtcatagcagagcagctgggcgaattccaggaagtccgccacgcggcaggctttttccagttccgcattgatgccgtccgccgttccggtcacacgcacgttttcccagaattccttgcggagctggggaatgcgttcgatggcgttcatgaggctttcttccgtacgggccatgccgcagtcttcccacatgatgaggcccagttcccggtggaaggagtccaccgtcttggtgcccttcacgttcaggagcttgttgatgcgttccttcacttcgtcttccgcggccttgaattccggggaggcggtggtgacggagccgggcttgatggtcgtgaggtaggcgggcagcgtggcgggaatgacgaagtagccgtcggacaggccctgcatcagggcggaagcgcccaggcggttggcgccgtggtcggagaagttggcttcaccgaggacgtgcagccccttcacgttggacatgaggttgtagtccacccacaggccgcccatcgtgtagtgggaggcgggatagatcatcatgggcgtttcatggggatcgtcgtctgtgatttcctcgtacatgtcgaacaggttgccgtactggccgtcaatccattcgcggcccatgcgcttgatttcatccgcaaagtccaggaagacgcccttgccggtgatggctacgccgcggccgtcgtcgcaggcttccttggcggcgcgggaggagatgtcgcgcggagccaggttgccgaaggaggggtacttgcgttccaggtagtaatcgcgttcttcttcgggaacgtcggaaggcttgatttccttcttgcggattttttccgcggtttcacgggacttgggcacccagatgcggccgctgttgcggagggattccgacatcagcgtcagcttggactggtagtcgcccttgaccggaatgcaggtggggtgaatctgcgtgaagcaggggttggcgaagaaggcgccgcgcttgtaggccttgtaggcggcggtgacgttgcagcccatcgcgttggtggacaggaagaagacgttgccgtagccgcccgtgcagagcaggacggtgtcccctgcgtaggactggatttcaccggtgatcaggttgcgggtgacgatgcccctggcttcgccgtccaccagcaccaggtccatcatttcatggcgggagaacatttcaatgtgtcccttggccacttccttttccagggcctggtaggcgcccagcaggagctgctggcccgtctggccgcgtgcgtagaaggtgcgcttgagctgggcgccgccgaaggagcggttgtccagcaggccgccgtattcacggccgaagggaacgccctgggccacgcactggtcaatgatgttggaggaaacttccgccaggcggtagacgttggcttcacgggcgcggaagtcgccgcccttcacggtgtcatagaacaggcggtagacggagtcgccgtcgttctggtagttcttggccgcgttgatgccgccctgggccgcaatggagtgggcgcggcgggggctgtcctggtagcagaagcacttgacgttgtagccaagctcggcaagcgtggcggcggcggaggcgccggccaggccggaccctaccacgagcacggtgtacttgcgcttgttgttcgggttgatcagtttggactcaagcttgtacttggaccatttgtcctgaatcgggccggaaggaatcttggcatccggcatccagtcgcttacgggaaaattaatcatgactttgagaggagttgatggttatttgatgatacccagaagaaccgagaccggcacggaaatgaagcccaggcagatcactgcgccgtaggcgatggcgacaaagttgtagaagggccggattttgcgggaatcagcgcccaccgtctggaagatggactgcacgccgtggcgcaggtggctgaacagcatcaggatggccaggatgtagaaggcggagcaccatacgttggagaatccggccacgatcatcttgtacacgtcaaaggtttccaccttgccgtcggaaatgaaggcggtgtactgggcgggatcgtaacccacgcgcagggtgtactggtacagatggtagatcaggaacaccaggatagtcaggccggtgtagatcatgtagcgggaggagagcgttgccttgatcgtgttcttgaacacgtagggttcgcgggcggcgtggttttccagcttcagctggatggtcagccagatgtggatgatgaagatcaccgcaagccccgcgcggatgccccagagggctgcttccggcatggagtgcaggccgtgggcgtaggtgttgatccattcagggcctccgaagataagaaggttgcctgccaggtgtcccgcgaggaacaagaccaaacataaccccgtcagagccacaatgattttgcggccgatggaggatgtcacgaatgtacatatggtttttactagtgcattcataggcgctctaatgaaataaatgcgtctccacaggatgcccggttcaaacccggatggcaagcctcttcttgaattcccggcgctttttggatttttgaaaagacgtgaaaagacgttgcagttcactagtttggaatagttataattttgttacctgttccggcttgacgaggctttccgcatgggcgtatcgtctgcgtatgaaaaggagtaaaaaagaggtattggacgccgattttgcggcggcgcgcgccggggtgctggatatagccgcgtttctggaccgggtggaccggggggaaggggaggcggatttccgctaccgcgccctgatggaagcgctccccctcctgtccgcctccggcgccgggcgcgtccgggccattctggaagccctttcctaccgggatgacgccgtgccggaaaccgccgccgccaaggcggcctgcggagccccgaacttcagcaaataagaatcatggctttcatagaacctcatatacacatggtgtgccgcaccacggacgaataccgggccatggcgcaggcaggctgcctggcggtaggagaaccggcgttctgggccggctatgaccgttcctccgcggacggtttccgggattacttcgtgcagcttacggaatgcgaaccggccagggcggccaagttcggcatggaccattacacgtggctgtgcatcaaccctaaggaggcgcaggatgtggcctttgcccgggaagtgatgaagctcatcccggaatttattgaccgtccgaatgtcctcggcatcggggagatcgggctgaaccggaatacctcccatgaaatgactatttttgaagagcatctggacatggcaatacgcctgaaccagcttgtcctgattcacaccccccatctggaagacaagctgaaagggaccagaatgattctttccgccctgaaaaaccgtccggagctggaccccggccgggtgctggtggaccattgcgaggagcacaccttcccgctggtgaaggaggccggctactgggccgggctgaccctttaccccaccagcaagctgaaccccaagcgggcggcggatattctggagctgtacggaatggatcgcgtctgggccaattccgcggcggactggggagattccgaccccctggcgcttacggccctggcctgcgagctttacaagcgcggtttttcccggcaggaggcggagaagcttcttttaggcaatccggaggcgttcatgggacagtccccgaagttccggaaggtatcgtccgtctagccgcatccctggccgcgggccgctagtccccgtccggaaaaaagacggtgaagacggctcccaggatgactgcggcgtcatccaggagacccagcttgccgattccgtcaaacaggaattcgtcaggagtcaggatgtaggcggcggcaatggcgagcagccatatattccgcttgttgaaaaaccgcggttctccttttttgcttttgaaataccggaaaaggcgcaggagcaattgctgtttctggagattcatgatcaggatgtggggtatgcaggttaaaaacgtttccccctttcaggcggaaggagcagcttgaaacaggcgcccttcccggaacgtgggggtgtgctgctcccggcagagcctgaatggccgctctgcgcaggggtaggacggctgcaaggatgaggcgcgccgcccgcagagggaagacggttttttccgtatccggttccggctgttccggcgtgggggaaaaggatttgtgcggaaggtggggtgacacggacgccccgtgaagcgtttcagccggaggctgccttgaacatcgtttttcaggggaggaaaggaagaagtatctgcctccggtagggtaggcgcgttgtgcggatgcagaaagggccgcctcacggagtcgcgaggcagccctgaaagaaaaacggagaaccggtgcggttttatgccctgcggcggcgcatcatcagcgcggccagtcccagcaggcccagggttgccgttgcgggttccggaacgctggcgatttcactcatcaactggccgatctgctcctgggaaagagcggagtcatgaacgtagagctgttcaacagcgtcagccagtcccgcgtcaatcagaatctgggtgatatccacgccgccgaatttcaggccgctggcagtatggtacgtggcactgtcgcccaggtagatgcgggtgccgaattccccggtgaccacggaaatggtcagggtgccttccgtgcccagagcggaggtggtagggccgccgctgtatgcggcattgttccataatccctggagagtacggtccgtattcaggcccgcaccccagctggtacttcctcccttggcgttaaacagggcggtataggcttccggagtgttgattttggacagatccagaaccatggtcacggtcatgttgttgcgcgtgcttcccccggaaacgggctggctaaaggtcgtgccggacaacaccagattgccgccatcggtcgtgatggcaacggaatccttccgggtgccgaaatccgccagacgggaggtgaagtcggaataccctacgatggaactgtccagaagcgtggtcgccgcggtggcgctcaggctcatgccggctgcaagcattaaggcggatagtattttcttcatgatcaatgttctggagtaaacggtacgcgtgcgcatgcataagcagggcttctgcgtaagtaactaaataacggatttggaatccggatttggaatccggcaagtatgaaaaagaggccaaagcaatagggaaatcaatgaataacaaagaccgttccaccacgttaataaaagaaccagaggcatcaaaaaatcattatttccaacgaattatgaatgcaatatattaacctttaatatttttaattgtttgcggattccaaatccgctacaaagcctaaaaggaacaggacaatagacatgaagaaaacactaacaattttagccgcacttggaaccttcgccgtttcctcagaagccgcgactgtttttaattattacactcctggagcagacaattacaacagcaccattcatgggttctatctggggctggattcttccgccctggcccccgtctctggttccggctctcccgcctccctgtccggagatatccggctggacagttttactctgcgcgggcccagcggcaatacgggcgctaacgtcacttacggttttctggtgctgaacgcttccgataattcggtcatcggcctgagcaccaatatgggaacctccggcaacggggtcaatctgacgttcaatttctcagccgtggatggttcttccctgattcttgacgccggcacgacgtaccgttacctgaccgtgagccaggccgtgatggacatgatcaatggagatacgtcaaaaacgtacttgtatgctgcgggagggacaggcgcgcctacttcttccacggatggagatacggtaaccatcagcaacggattgactgctcccggcattcgcggccatcatgacagcgcgggagcgcccgatgattccattgtcattacaggagccaatggaaccaataccttcgctcaattatcccccatttttacggagatccgcggggaagtggttccggaacccgctacggccacgctgagcctgctggggctggctgccctgatgatgcgccgccgcagggcctgagcccttgatgacaggcttttgacggataagggctgttctcatggaacggcccttattttttacccctggaaaaaagggctgcgaatgtaacgtatccggatgcgggattcatgacatccggagggtgcaaggatttccggtttcaggttcccgtatccgcttttctccgcatggcggcaattttctcaaagcgcttttgcgacggagttccggagaccatctcctttgccggaaaatgcaggtcaaattcggcggcgcacttttcatcaagatcatacacggcagcttccacgtaacggcctttcatgctggataaggcctcttcctgcagttcgcagacctggagggctgccgcgtacatgtcatccgccgttctgatgcccagcgtttccgcggccacgaacccgtggcgtgaatagtagtccgggtcgccgtacagcagaatggcccggaaccccatttcacgggccttcattttggtatgttcgatcatttgccgtccaattccccggcgctggtattccggaagaacggaaatgggccccatgcccagcacctcgcattccttcccgtcatctgtcctgatgacggattttgcataaacgatgttcccgacaatgcggccgccgtggacggcgaccacatccagttccgggatgaaggaggggctgccgcgcatgatatggagcaggtaatgctcattgcagccgggggaataatggttccagaacgcttcccgcgtgacatgttccgtttcggcatagtctgcgggctgttccgttcttaatttgatggtcatagaaggtctctcttcacggctcccccttggagaagttccagaggcggtgcatggtgatgacgtccggaatgttcatggggcgtaccacgcggaagccgatcatgccgccgtccgtcaggtaccagatgcttttggggttctggggatcctgccggttccaggcgggggagctggcgcggcgcgcggcgctccgcaggcggtccggatcgtcttcccaggagccgccgcgaacgacgtggggagccttgggcgcgatgaccagggggtctttggcgggctggccgtcccgcttgccgtaggcatccggaaggtaggaatccagaacccattccgccacgtttccgtgcatgtcccggaggccccacttattcggctttttggagcctgttttttggtagcggtcgttggaattgtcccagtaccaggcgtactggtccagggcttcctccccgtttccgtaagagtaggctccggggttcccggcacggcaggcgtattcccattccgcttccgtcggcaggcggtagtaatgcccggtctgggcgctcagccattcgcagaatttgctggcggcgtgatgggacatggagatggccggcaggccgtgttcatagccgtggcccatgcccaggttcatggcggtgtagggggctgtgggctgcgtgacggagtcccacagttcatcgtccggctgttcctccagaagctggccgtccttggcgcgcggacgtccattttccatgaaggccgtatagagctcccagggaatttccgtttccgagatccagaacggagagacgttcacttcatgccgcgggccttcgtccggcttgcggcccggctcctccgcagggctccccatgagaaaggttccgccgggaatggcggccatgcgcagggatgcccccgctgcgggcaccgcttccgtataggattcaaaacgtgaggggatcccggaagcttcaatgagctggtggatttggcgtgtggtgccgaccagctccctggcgggcagatcgtccggaatagggagggcgggtccggcggcgcggtccagctcccgtttttgcagtgcggagcggctctctccccactggcgcgcgccggtaatgcgcgcggcatcctccgtggccgggcggggggagccgtcgtcccggcacccggccagcagggcgcttcctcccagaaagcaggaaacaaggaaaatgccgcgcatgggatggtgaagaccgggaaagccttacatcgtcatgcccccgtcacaggcgatgacctgtccggtgatgtaacgggcatcgtcagaggcgaggaaggccgtcagggcggcgatgtcttccacggagccctgttccttcaggggaattttcttgacgatttcttccttgaggttgtccggaatggcgttggacatttccgtggaaatgaagccgggggcaatggcgttgcacgtcaccttgcgcggggcgaattccagggccagggatttggtgaaaccgatgaggcccgccttggaggcggcgtagttggcctgcccgatgttgcccacgaggccgatgacggaactcatgttaatgatgcgtccggcaggggacttcatcagcacgcgctgcagggctttcaccgtattgaacgcgcttttcaggttggtatccatgacggcgtcccagtcttcctccttcatgcgaagcatcagggagtcacgggtaatgccggcgttgttcaccagaatgtcgatctgcggaaagtccttcaggatggcggagacggtttcctgaacggcggcgtaatccgccacgtcgcagggataggccttgcaggagtccgggaattccttgttaatctcttctgcggctcctccacagcttgacgggctgcggctgatcaggatgactttggctccttctgaagcgaagcggcgggcgatggcattgccgatgccgcggcctgccccggtaacgatggctgttttacctgctaacttttgcatgctgcccacagtaaacccgtttttcatggttccggcaagcttgaaatggaagcgggaaagggcggttgttctccacggcttttcctgtatgggcgcctttttccggtcaattcggcgggaggaggtcttcagggttgggagaaagaacgtttccggctgtggctggcgtattgtcctcctccggttccgccacatcttcatccggctcgacgagatcgctgaattcatccgagttttccaggatgtccttcagggcggaggagccgtaatagcgggcttccagcagccgctggccctccttttcacagcgttcgctcagcatgtccatccgttcctccattttttctgacagggcgtccattttttccttttccgcatcgctcaatttctcccggaagcccatgagacgctgaatgtccttctgaatgccctgcaatttcttgacggccttgtccccgctttccttgtcctgtactgccgccagcgtctgctggacatcaatggctacggaaaaggcctggttgaggagggaatccgcggacggagttttttccgccggggctgccggcgcgggtgaagccgccggggcagccgtttcaccaaaggcgagcggaactccggccatcagggcggaggccaggacggggacgaggaaagtcttcatcctgtctttctaaggcaggatgagacccaaggcaaggagaaaagggaagctgaaaaggggaggacggttattccgccgtgatgccgcctttttcgtcgtccagaatgcctgacttttccaggtaataatcgtacccgcccgcataggtggtgatggttccccggttcacgtgcagggttttttccgccagggagcggatgaagtgcacgtcgtgggagatgaagaccagggtcccctcataatgtttcagggcctgcaccagggcttccacggacaggaggtccaggtgggtggtcggttcgtccatcagcaggaggttgggcgggtccaccaggaacttgaccaggctgagccgtgatttttctccgccggaaagcacgctgacgcgtttttccacatccagcctccggaacaggaaggagcccaggatggatcgggcctcctcctcccggatttcagcgttgcacttcatgatttcctccaggacggtgttttccgtattcaggttttccgtgcgtgcctgggagaagtagccgatgcgcgtggtggtgccgggagtgcgttttcccgagtcaatggggatgatgcccgccaggattttcagcagggtggacttgcccgcgccgttggggcccaccagcacggtgcgttctccccgttccaccagcaggtccaggttttcataaaccttgtggtcgccgtaggactggcagattttttccagctcaatgaccttctgggtgctgcgcggaggctggggaaagttgaatttgaacaccttcctgcgggccacgggtttttggatgagcttcatcttttccagttgcttgatgcggctctggacctgcccggccttggagttgatggagcggaagcggtcgatgaattcctggatgtgcgcgatttccttctgctggttgcggtaggcggcctgaagctgttcaaagcgcatgtccctttgtttcaggaaatccgagtagttgccgcggtattccaccagttcctcgttgtcgatgtcgtacacgctttccaccagttcgtccatgaaatcccggtcgtgggaaatcatcaggatggcgccggggtagtttttcaggtagcgctggagccacagcagggaaaggaggtccaggtggttggtgggttcgtccagcatcaggaggtccggttccaggacgagcagtttggccaggtacgcgcgcatgatccagccgccggacatttcccgagcggggcggtggaagtcgctttcccggaaggccagccccttgaggattttcttggccttgggttccagctggtagccgttggcggcgttaaaggtgtcaatggcctccgcatactccggcgtatccgtcttgttggcgttttccgccgtccggatgacgtggatggcgcgttccatttccggcgtgatgcccatggctatttccagcacggtttcatccttcggttcgctggcttcctgcggaagatagcccaccatggcgtattcatccatgttgatagagccttcgtccggcgtatcttctcccagaatcatgcggaacagggtggacttgcccgcgccgttggggcctaccagggcaacccgttccccccagttaatggtcatttccgtttcccggaacagggtgcgtccggcgtgggatttcgtgaggtttttgatcgtcagcatggtgaagaggggcggcattctaccggggagggagggggaaggcaagagccgtcagggcagggacggtcatttttgaaagctttactggatttttacgcgtaatctgctagccttggcgcgccatgccgaccatgcagacattcaggcttttgcttgctgccgccctcctgtgcggatggagttcctgctgcactcctccggctgaggattatatacagagaccttacgtgcagcagcagatgtccggattggcgaatgcttttctggggctgctgccgccggagaaggccgctcttcccgccgccagggcggaagccaagtggctggcggacacggcggtagtccagtccgcggcgattgcccggaataacaggattgtgctgttcggctggctgaacaacatcctggtcaattccaacctgcgcgacagggggctctgctggcaggtgcagcaggatttgtaccgtgacatgcgccgccgccccgtgaagtttttccgtgtggggttgaccatccgcgaccatggaacgggcagggagcacagctgcgtgtacgtgaacgctgccggagggggattgcagggttccatcgtcctggacgcctggaagaactgcgggcatctggtggtgctgacccagaaggaccgggaagggggcaaatgggaggaggactggcgggaaccgttcgtgtccaaggcctttcctgaagggcattcctacggaatggaccatcacctggtctggcccggatgggccaggaaacgccccctgctgatccagaggatattccagtccggtcagcaggaggaggcgaaggcaagcggttccgctgctgtccataaagaagctggcgcttccggcggcggagcttccaaggctgcctgaatgtaaaaggccgtttaacgaggccggagcttgtgcacgtccctgcttgatggcgggtgacgcctgcatgtgcggggaatgcctgcgtttgctacggcgtccgccgtttttaaggaaaatcccggtgaaccggcaaatgacggctgaaaaccgggttccgggcaaataaaaacgcactcagtgcgtacaccgagtgcggattaattggatgatttgctaatgttgcagggcgaggccctgctgcaaacttacttgcccttggcctgcacaaccggagcgggagcaggagcggtggtttgctgttgctgctgctgctgggagcaagaagcgaccaggcaagcggcgccggcgatggcgaggatagcgatgttcttcataattcgaattaaatacagtgtttgttaactactggaacctccgcatccacggaggtttgctgggaccaatgtaaatggtggcaagtagaaatcaagagattttcttgttccatgtcacggcattacagaaaagagcaggacccccggtttcaggagtcctgctctttttgatgcgttatggaaaacggtttgtttcaaaaccgttttttacggtcacaggctggtgcctagttcaataatggagtagtccccgtccggcctccggtacacgatctggagcacgtcgcgtcgcgcattcctgtagagcacgaagggcttgtcggaaagttccagttccatgatggcttcctccttgtaaagcttcttgagattgtagctttctctgtgaatgaggaggggttccgggtcttccttggaatctccggggtaatccagtacggaatcgtcatataccgtttcatccagcttgcggatggtttcctggtgatgggggcggaaatttttcatcaggcgcgtcttgtgcttgcgcatgcggcgcatgattttggtgatcgtttcgtcgatgcaggcgtacatgtccgtcccttccgtggaagcgtcaatggtgatgtggtccgagcagaacagaatcacctgggaaatcttgcggtcgcgttgcacatcaagcaatactttaacctccataatgcgtgggaagtccaggcggatcccctcaatctttttcgttacgaattcccgaatcgcgtctgtgacttccacgtggcgccccgtgatcgtaatgggtgtgtttacgtttaccttttgcattgtcgtacctctttctagttgatgttaatgcgcggaacccagtccgcacctttcaagatatacagatttgacaatgtttgtcgaggaatcctttctttttttccgtgtgcggggaaggggatttttccgctcttgttccctcatgccggggccgggcaactctcctacctgttgtgagccaagccgccggaaggggcctgcgtttttcctttcccttccgccgcccccggaaagcgtttccggacctctgtcatacggtcgcagccatgaaaatttttatttgaaagtacttgacatgctgcggaagtaggttataacaattccgcactcctctacggatgctctttaaatcgcgggatggagcagccaggtagctcgtcaggctcataacctgaaggtcgcaggttcaaatcctgctcccgtaaccatttgaaagccctgcaagtcaaaagcttgcagggctttttcgtgcccctgcgccatggggcggaagtaattcttttaaaaaggtcatccttgaaagggaagtggctgtgaacgggtattttatggccgtgtggagcaatggtgcgccgttactgccgtctttggccttgtggcgattacggacaaagggtatggtgcagcaagataatctgcgccactggacggcatgacgaaggaaaacggcccgttgcccggccggaaacgatcgtttgcatcccttccgtggcgccgctccggctgaataatataaaacactacaataatgggaaactcaattgaccatggcatgttccggaagtccgtcctgctggctttcggattgtctttttccttctccggtctcgccgttgccgcatcgggagaactgaccccggaacaacaggtccagcccgttgaaggcgccaggaaaatcaaccctgccgccgtggaagtgctgcttggcaagaaccaccggatgacattcgatttttacggggacaacgttttccggattttccgggatgacaagggcggcattatccgcgaccccaaggcggagccggaagcccgcatcctggcggacaacccccggaagccggtttcccgcctggacgtggaccagcagggagatgtggtcaccatcaccacagggaagatcaggattgaaatagacaaaaagacctctcttctcaagatcatcaacctgaaggacaattccgtggtggtggagcaggcggcccccgtcctttttgaaaagggcagcaccagcttttccctgaaagcgaagccggatgaatatttctacggcggcggcgtgcagaacggccgtttttcccacaaggggaaggtgatttccattgagaaccagaacagctggacggatggcggcgtggcttcccccactcccttctactggtccaccggcggctacggcgtcatgtggcataccttcaagaagggccagtatgatttcggctccagggagaagaacctggtcagcctttcgcatgatgaaaattacctggacgtctttttcatggtcaacgacgggcccgtcagcctgctgggggatttctaccagcttaccggcgcccccgtcctgctgcccaagttcgccttttaccagggccacctgaacgcctacaaccgggattactggaaggaagacgagaagggcatcctgtttgaggacggaaaacggtacaaggaaagccagaaggataacggaggcattaaggaatccctgaacggggagttgaacaattaccagttttccggccgcgccgtggtggaccgctacaaggcccatgacatgccgctgggatggctcctgccgaacgatggctacggagccggctacggccagacggataccctggacggcaatatcgcgaatttgaagaacctggcggactacgccaggaagaacggcgtggaaataggcctgtggacccagtccgacctgcatcccaagccggaaatcagcgccctgctccagcgcgacatcgtgaaggaggtgagggacgccggagtgcgcgtgctgaagacggacgtcgcctgggtgggcgccggctattccttcggcctgaacggcattacggacgtggcccagatcatgacctattacggtaacaacagccgaccgttcatcatttccctggacggctgggccggaacccagcgttatgccggcatctggtcgggcgaccagacgggcggcgtctgggagtacatccgtttccatattcccacctacatcggctccggcctctccggccagcccaacatctgttcggacatggacggcattttcggcgggaagaatccgctggtgaacgtccgcgatttccagtggaagaccttcactcccatggagctgaacatggacggctggggagccaatgaaaagtatccccacgccttcggggaaccctatacctccatcaaccggtggtacctcaagctcaagtcggaattgcttccgtacgcctacagcatcgcggaggaatccgtttccggcctgcccatgatccgggccatgttcctggaataccccaatccctacacgctggggaaggccacgcagtaccagttcctgtacggcccctattttctggtggcgcccgtttaccaggaaaccagggcggacaaggaggggaatgacgtgcgccacggcatttacctgccggaaggacaatggatcgattatttcaccggggatttgtatgaaggcggcaagatttacaatgacgttgacgctcccctgtggaaactgcccgtgtttgtcaagaacggcgcgatcattcccatggccaatccgagcaacaatgtctcggaaatcaatcctaacctgcgcatttacgagctttacccgcacggcagcacttcctttaccgcgtatgacgacgacggcgtgacggaggaatacagggccggcaagggtgtccgcaccctggttgaatcccgggcggacgacaagaacaacgtgaccgtcaccgttcatccggcggtgggggatttcaacggcttccagaagaagaaggccacggagttccgcatcaatgtgacgcagaagccgtccagcgtttccgccaaagtcggggaaaacagcgtcaacctggcggaagcgaattccatggaggatttcaagtcccgggagaacgtgtatttctatgaccaggctcccaacctgaacaggtttgcgaccaagggaagcgattttgagaagaaggtgattgccaaaaacccgcagctgctggtgaagctggccccggcggatattacggctgtccccaccgtgctttccgtggaaggcttccgctttgaacccgcggaaaaataccgtgtctcttccggcgccctgaccgctcccgctaatgccagggtgacggaggaaaacgcggccgcatataccttgactccttcatgggatgctgttccgaacgctgatttttatgaaatcgaattcggcggaatgctgtataccaccatcaaggggacggagttcctgtttgaggatttggaggcggaaacgccctattccttcaatgtacgcgccgtcaacaaggacggccattccgcctggacggccatcagcgcgaagaccaaggccaacccgcttgagttcgccattccgggaatcgaaggtgaaacgagcgtggaaaaccagggcaattccctgacgaaactctttgacttcaaggaaaaggacgcgtggcacacgaagtacaacgagaaggccgtgccgtttgacctggttctggacctgaagaccatcaacaagcttgagaagttccattacgttccgcgtgaggacggcggcaacggaacgctcctgaagggctccatttcctacagcatggaccgggaaaactggacgaaggccggaacgttccagtgggacaagaatggcgacgtgaagatcttcaacttcaaggacgcccccacggcgcgctacatcaagctgaatgtcacggaaggcgtgggcgactacggctccggcagggaaatctacgtcttcaaggtgccgggcacggaaagctatctgccgggcgacatcaataatgacggcaagatcgaccggaacgacctgacctcctacatcaactacacgggcctgcggaaaggcgattccgactttgaaggctacatcagcaacggagacatcaacaagaatggccttattgacgcttacgatatttccgtggtagccacccagctggaagacgaagccgaccagccgcaggaagaagccgccaggaaggacgaggaaggggataagaaggaaggggacggcgagaagaagaaagccgccgaggaggcaaagaagaaagcccgcttggacggaaagctcctgctcagcgccgataagaagaggtacgccaagggagacgccgtcaaggtgaccgtgaagggccggaacctccggctggtgaatgctctgagctttgccctcccgtacgatcccaaggatttggaattcgtgggcgtggaggttaagaacatgaagaagatggagaacctgacgaacgacaggcttcatacgaacggaaccaaggccctgtatcccaccttcgtcaatatcggggacaaggaacctgtggagggaacctccgagctgtttgtgctgaagttcaaggcccgtcgcgacgtgaagttccagccgaagctcacggacggcatggtggtggataaaaagctgaacaccaggaaattgtaattttaacatcctgatgcggctccatgcgcggctggacagcgtccacgcatggaggccgccgtttccggcagggcgcccccgcggctttcgccgccgtggaacggcgcccttccgcatgttccggaggcttccggacggagcggcggaggggaaatatttccctgcgttgctgttccggcggaggggtgacgcaatgaggctcccttcacgggcggatgaaccgtttttttctggagcgcccggtcttttcacttatgttgggggtgccagacaggcgcccacgatgccatgaccggccccggactcatctccttgttctgctttctgatgacggccgcccattttttgcgcggcgggatgcatgcgggcgtcattttgtgcatggggctggcggcgctttcgttttcccggcgcggctggctccgcaggagcgtcacgttcctgctgctggcctccctgcttttctggggggcggaaacctggcatctggccaggctgcggatgatggagggactgccgtttctgcggctggccgccattctggcgggcgtactgctgcttcatgcggcggccatcctgtggcgcaggcgcggggagaaggatttgcctgttccggagctggcgcgcagccgcgtgttttccgcctccgtgctatttctgtttctgctggatgcgctggcccctttccgcctgctgctgggagagcgtgttctgccgtggcagggcgtcaacggattcgtgattcttcttctggcctggtggggaggctattgtgcggaggggctgctgaatccgcaggcgtctccccgcaggcggcggctgatgtggaccgtattcgcctccgtgttttttcttcagtttctgctgggcgtgacggtggcttcctcccttctgatgacgggcaggctgcatgttcccgtgccgttcatgatgatttccggcccggtttaccggggagaaggcatcttcatgctggcgctgttcagcgtatccgtccttctggccgggagcgcgtggtgcagccatctgtgctacttcggggtgtgggactgcctgtccgccgcctcctcccgcagaaaggggcgtccggtgaagggaggcaagggcctccgggactggagatgggcggccctcgccgcagcggtgggaacgccgctgctcctgtccctgtggggactcccggtggaatacgccctggcggttgcgcttgccgcggctttcctggctcccctggcctggagaatgagcgccgcgggcggcgtgagggaatattgcagcaggttttgccccatggggctggccgccggtttgctgggcaggctgtccccctggcgcatgctcgtgaaggagacgtgcaccgggtgcatgcagtgcgccgccgcctgccgtgacctcgccatctcgcgcgagggcggggcctgccgcatttccaggcgctgcaccctttgccgggactgcatttcccggtgttcccacggcgctctgggcctcggcatggccggtcccttctcctctgtgccgtccgcgcgggcggacatgtattttgtaacgctggtttccgtcatgcacgtggtgttcctggcgacggcgcgagtctgattttattcatcatgagaaatacctacaccctggaatatccgttttgcggaggatggatggaacccgcccagtggcaggccgttctggacgccgtggacgggggatgccgccttgtttccttttccaccctgtccattcctctggacggggtggatgagcgggaatgcgtggagaagggcattgccctggcggaaaagctttcccgcctggttccctatacggaacaggccgtggatgtaggttcctccctctgctggggggaaaaccgggacgcatggctggagttcgccggaaagttgaacaggttttccgctcccgtttccttccccgcgtatgaaatacgcaaaaaccgcgaacgtcttttttcctcggacccgcagcctgaaggacgtttttccgccctgcacaagcgcgcccgtatttgtctggaagaggctccgcaccatgaattcgggctgttttcctgtgacctgggctttgtggttcccaagggcggccatccggagggcggcgtgcatttgtttgccggaggcgggggcggcattcaggggggcagtgcggccctggcgccgcgggcggcatcctggctggggcggtattccctgccggaggccgtgaaggcggcgggggtgctgacggccctgaatgaacagttcggggaaccggacaatccgcgcaagaggagattgaagtcgctgttcgcctcccgcagcctggactgggttctgaatgaattgaaaaacgccggcttgtacccgggagagggggagcaacctgagttttcctcttccggggagtggagccgcaatgatttctataacgggctgctggtggcgctcccttccggcagtctggaggatacgccggaatatgccgtggcgtcggcatggcggcgcgtggtcccttttttgacttctccggtgcgcatcacgccgcggggcaatttgaggcttcatccggcggacaggtgcgtggcggaacgcatcaaggtactgctgcgcgggtccaggcattttcccccgctctccattgaatcctgctcctgccgcggcttgccgggctgccgccgcgcccgcgccgcttcttccctggtccaccgggagctcaacggatggctggaagaaattctgcatgaattcgggctggatgacgaacccgtggtgttccggatttccggctgtcccaacggctgctcccgccccttgtttgcagagctggccatggtgggccgcagcgagggcgtttacgatgtttttgccggagggcgcgcccagggcgacaggacggcgttcctgctgcgccgcgccgttccccttggcgaagtgagggagctgttccgggaacttttccggcagttcgcccttgccaaaggggagaatgaggagtggacgttcggggagtgggtctttgaccgcctgctttccggagagacagagccgtgacggctgcaccgtccgtgaattccacgggaagcttcagggggcgcgccgggacctccctgttttttcatgggcatgcatcaggaggcgcgaagatgaaagccgcgtttttcctttttccggtatgttgttgtgtggcgattttttgacctgaaaatggttcaggcgggttccggaacggatatggtggggaatcatgtccctggcctcttttttctatgccgcctgttttggctgcgccgtcggctttgcgtgtggcgcggaaggtttttcctcctggaacggaacggcgggcggcgtgtcctccctgtccggactctgggcgcaaagctacggagcccgtcccggcaacgtgcatttgtacaggaatggcgagaatccgtggcttcaggagttcaacgtgtccctgcgggcccagtaccaggcggcggccgtgtcccccagcggttccgggacgtaccccggctcccacgggcgcacggaggaatggcggcggctgaggctgggctggaacgccagggtgctccgggacctgaaagtggctaatatctggaacatgggcggcgtggacagtctgggctattacaagggcggacgctggaacaaccacaaaatgacccgcggcaacctttatgaggcccatttggaatattccctgccgggcgctgttgtgggtgcggggaaggtgcttcccgtcattctggcggagaaccgcatttccagttccaagtataagctgccggagatttccgccgtggaaaacatgctggtcagcgacagttccttcggcgtctggagctataatgacgaaaagaaggagccgctggggtattacgcgggcctgtggtccaacacggacgagaggagccgcggaacctggggcacttgggagtccgtgaacatgagcctgggcctgtccgcgcgcgcggacggcctgctgctgaaggaagggcggctttactgcgactggatttacaactggggcgacatgaaggaccgcccctacgacggcaattacacgggcaccggggcgcggaacgtgctggcgctgtattattacggaaagcagggcgcatttgagctgatggcccaggcggtctgggcctcccggctgcgggagtattcctccggcggcgtgatagctccgtccggcctggcggggctgaccgtcatgccgtccctcaacctgacggggcatgtgcaggcggtcgcccgctaccagctcgcattcggtccggacgccgtgaagccgaacaagcgctatgcctccctggcggaaaggggagggaaccgcgtggattgctaccaggccgtggccgccgggttgaatttctttgtgtaccgggacgatcccgcgcggctgaagatcatgacgatggcggagtacgggcattcccgcggaggccgttccgccgggtttacggggtggacgtttatctgcggcgcgtacacgaatttctgaccgtgtccggcgccgtttatgtgacaacattgcaaccaggcggctcttgtccggcggcggggaaggttttaggttggctccgttcccggaggaaagccgccgctgctgctccttcaacgaccagacattacagattatgaataaagtcagttgcatcatcatggattgggccggtacggccgtggacttcggctgtttcgcccctttgaacgtttttttgagcgtgttcagggaaaagggcctggatatcacctacaggcaggcgcgggaacccatggggttgctgaaagtggaccacatccgcgccattctggaaatggagccggttcgcgaacagtttgagaggaagtacggccgttcctggaatgaatccgacgtgcgggagctttacgccgggtttgaaacgcacctgttcgcctccctgaaggatttcaccacccccattcccggcgtggtggaaacgctggaggggctgaaggcccgtggcatcaaagtcgggtccaccacgggctacacggcggagatgatggacattgtgcgtcccggggctgccgcccggggttacgtggtggacaacctggtgacgccggacgaagtgcccgcgggccgtcccgcgccgtacatggtttaccggaacatgattgacctggagatcccctccgtggaccaggtggtgaaggtgggcgatacgatggcggatatccgggaaggattgagtgcgaaagtgcacaccgtgggcatcatcacgggcagcaatgaactgggcctgagcgaggaggaatatgaggccatgcccgccgcagaattgaacagaatgaaggaggaagtgcgccgccgcatgctggacgcgggagcgcattacgtgctggattccattcgtgaactgcccgcctgcattgaggagatcaacgcctccatgaaccgctagcctttcaaccatccattaaccatgagaaattaccttcttcttacccccggcccgctgagcacttccgaatccgtccgccaggccatgcttcaggactggtgcacctgggacaaggattacaacgagggcgtggtcaccgtcatccgggaacagcttttgaagctggcggggctggacggcgaatacaccaccgttcttttacagggcagcggcacctatgccgtggaagccacgctgagctgcgccgtcaggccgcaggacaagctgctgatcgtcgccaacggtgcgtacggcaagcgcatgggggacatcgcccgccgccatggcctgaatcacgtcctcgtttccctgaaggagacggcgcccgtgacgccggaggccgtgcggcgcgcgctggaggaacacccggacatcacccacctggccatggtgcactgcgagaccaccaccggcattctgaatccggtggaggccgtcgccagggcgatccgcggtcgcggcctgacgttcatcgtggacgccatgagcagcttcggcggcattcccattgacatccgcaagctgggaatcgacttcctggtcagcagcgcgaacaagtgcatccagggcgttccgggtttcggcttcgtcattgccagacgctccttcctgtcccggtgcgagggggtctcccgctccctgtccctggatttgtatgaccagtgggcggagatggagaagggccatggcaagtggcgctttacctctcccacgcatgtggtgcgcgccttcttccaggccgtgaaggagctggaagatgagggcggcgtggaagcgcgccatgaccggtaccgggaaaaccatgcggcgctggtggaggggatgcgccggagcgggttccggaccctgctgccggacgaactccagtcccccatcatcacgtccttcctgtacccggaggaggattttgatttccagaagttttatgaggccttgaaggaacggggattcgtcatttaccccggcaagatttcggaagcccctaccttccgcatcggcaatatcggggacgtgttcccggacgatttccgccgcctggcggaggccgtggcggatatccgccggaacaagtagttcccttcccatccatcaatgccagcgggccgctgcggcggccaggaggttaccatgctacagttgaaaaacatcaagaaagtctataacggagttcccattctgaacggcatcagcctggacatcgggaaaggggaaatcgtctccatcctggggccgtccggcagcggaaagactacgctgctgaacgtcatcctggggctggcggaactggacggcggccagatcctttttgacggggaggacgtgagcggcacgcccatgcagcggcgcggcttcaacatcgtgttccaggattatgccctgttccccaacctgaacgcctatcggaacatcacgtacggcctgaagaacaagccgggggtcagctccccccgtgaggtgcgggagctggtggagctgctgggcctgagcgaacatctggacaagcgcatcgaccagctttccggcggccagaagcagcgcgtggccctggcccgcacgctggtgatgaagccccgcatcctgctgttggacgaacctctgagcgccctggacggcgtcatcaaggagtccatcaagtcccgcatcaagacgattgcccgggagtacaacctgaccacgatcattgtgacgcatgacccggaggaggcccttaccctgtccgaccgggtgctgatcctgaacgaaggaggcatttcccagtattccacgccgcgggaaatcatttccagccccagcaacagctttgtgaagcagttcatcctgaaccagctggagatcaagaggaataacattctttccctctttgagggttcctatgcataaaacccagatagaaatccggggcgtgttctgggcggttgccctggtgttctccgtcttcctggtcctgcccatggcgctgctgctgggcaagtccttcctggtaggtggggaatccggcctggggaattatacggccatgctggccagcccggcattcctggaatccttccggaacagttttctgatttccgggatttccgcggcgctgaccaccgcgctggcctttttcctggcgtatgccgtgaacaatacgggactgccgcccttgttccgcaagttcatcgcgggaatgacggtggcgcccatgttcctgcccaccatcacgtacggcttcgtcatcatctattccttcggcagggaagggctgctgacgcggctgctggggttccaggtgctggacatttacgggttccagggaatgctgctgggctacaccatttacacgctgccggtcgccttcctgctgattaacaacaccttcaagtatgtagacaagaacttcgtcatcgtttccaaggtgatgggggacggccccgttcgcaccttcctgggaacggccgtgaggccgctggtgggtacgctgggggcggcgctgatccagtcgttcacgctgagttttacggacttcggcattcccgcctccatcggaggcagttttgacgtggtggccatccatttgtacaatgaaatgctgggggccatcccgaacttcggcggcggcgcggcggtcgccgtttccatgctgctgccgtccatcatcagcatcctgctgatcaattacctggaacggtacaatttccggtacaacaggatttgccgccaggacatcgtcaaaagccgcctgagggacgccgtgtgcggcgccgggtccctggccgtcatcggaaccattgcggcggtttttgcggtcatgttcgtggtgcctttcgtcagaaactggccttatgaggtggaattttccctggaacgcttcatgcgcatcctctcttcccgcggcctgctttccatttacggcaattccctgtgggtggcgctgctgaccgcgctgctgggcaccctgctttcctacggcgccgcgctggcatccgcgcgctccgggctggggcgggtggcccgcggcgcgattgatgggatagccgtggtgaccaacaccattccgggcatggtgctcggcctggcattcctgttcgccttcacgggaaccagcctgcaaaacaccttcctgattctggtgctctgcaacgtggtccatttcttcaccacgccctacctgatgggcaagagctccttggagaaaatgaacaagggctgggaggccacggccgccctgatgggtgattcctggctgaaaaccctgtgccgggttgtggtgcccaattcgctgggaaccgtgctggaaatgttcagctattatttcatcaacagcatgatcacgatcagcgccgtcatcttcctagtgggcgccagaacggccgtgctgaccaccaagatcaaggaattgcagcattacgcgcagtttgattccatctttgtgatgtccctcctgattctggccacgaatatcctggtccgggtcattctgggcggcattgtcgcccgatgcaccaaaaaacaataaaataccgtcatgaaaaaacagtccaccatgattgcctgcgcgcttgccgtcgtttccggagtccttctgtgcctgggcggctgcaatcagagcccggaggtagtgatttactccaacgcggacgaagaatcccggctagccatgcaggacgccctggacagggccggattttccggacagtacattttttcctccttcagcacctcggagctgggcggaaagatcatggcggagggcagcaacattgaggcggacgtgattaccgcctccacctactacctggaaagcgcccagcaggcccaccggatgttcgcccccctctccttcacgttccatgccctggaaaagacgcccggtttctgcgcgccccttacggcgcaggaaggggccattttcatcaatacgagggcgcttcaggagaacgggctgccccggcccgcctccctgaaagaccttgcaagcccggcgtacaagggattcatctccattcccaatatccgcagttcctccacggcatggctgatggtccaggccctggtcagcgcgtacggggagcaggaggcgcgacgcctgctgcacagcattgtggagaacgcggggcctcatctggaaaattccggttccggaccgctgaagaaggtgcgcgccggggaggtggcgattgccttcggcctgcgccaccaggccgtggcggacaggaaggctgggctgcccattgattacgtggacccggcggaaggcaatttcatgctgacggagtccgtctgcgtgacggacaagggcgcggggggcaatcccctggcgatgaagatggcggagacgcttgtccggaccgcccgccccggcatcctcaaggtctaccccgtgccgctgtatgagggggaaaactttagggaggatgccagatcgtccaacgtgaaggcctttcccgaaccgctgacggtagacttgctgaaaaggcaccaggcgctgatgaattaggttttttcccggcagagacgggtgccattcaggccgcggaatacggtttccgcggcctgaatgcgttggtaaggcacggtttccaatggccgttcagaagagataaatttggtttcagaaggtcatttctgctgttcattgatgaatttattgagtatttaaagtttttgctatgatttttgaatgaccattaaatttattaaagtcactaaaaaagataggatctgttatgccccggcgccggaaccggtggagcacggagacaagctggaaatcatggaaatgaaggatgactcccttacgccgctgttggggaggcccgccggattttccctgtccagaaaccccatggtgttcgtcaaaatgaacgacgggttccagcgcatcctgatgaagcatatcctgtatgtggaggcggggggaagctactgcacgctgcacgtgcacggcatgtcgtccattctggtatccgccccgctggcgcgggtggccgagcacctggacggggaatatttcatccgcgtgcaccgttcctatctggttaataaattacacatagagtccattgcgggtaatttccttcaggtggggaatgtttccatccccgtcagcaagttcatgaaaaagaaagtgctgggaagcctgaacatgctgtcgttttccaaatagaccccggccatggccgccggcgccgcgggaaagcggaacagttcttccggacaggcgggatggaaaaagcgccggaatgaccccatgatcacaacgtcgccaaaaggcggcacctcatattaacctcaaccagaaaataaaataatatggcaattgacaaatcagcagcagatgtggcgacctcctccctcaagtcgctgcctttcggcaacatcatcggcggtcccctggtcgcctgcgtggaagcccaggcccaggcggcccggacctcctgggaattcatccaaaatgtgggtctgtacacggaaggagaagagaagaagacggtgaatgtctccttccagttcatcaaggacggccacatggcccagattacggttccccttctgaccatcgtccccatcccctacatcgccatcaactccattgacatcaacttcaaggcgaatatcagcgcttccgccgccagtacggagacggagaattcctccagctccgtagataccagtgtttccgcctctgcaagatgcttctgggcgcgcggcagcatgaacgccagctattccagcaagaaggactcctccgccacgaaggactccaagtacagcgtggagtacacgatggacgtggccgttcatgccggacaggacagcatgcccgccgggatggccaaggtgctggaaatgctgaacaacagcatttccgtggtatctcccaccggttccctggaggttcagcatgccatccaggacgatggaagcgtgaagctgatgacctcctacaagaacaaggaaggcctgtttgagccggatgccatcactctccggataggggacgccacggacccgtttgataacggtgcggggaatgaagccaagattgtgaaaacggattccggcaaggaatacacgatttccaaggaagacgccaggaactgcacggtgagcgccggagagctcaagaggaaggtggccgtggccgctacgcctgcacaataaccggagcataacgatttctcttccatcccagagccatgtctcgtctgaatctgattgtcgaatccctgcttagggacattatcgaagcgcagcacgcggcgaactgccatgcggcggggctggcgcgccagtacgggaagcacggcggtgtgcgtggcttccagcttcccagcgcccagatagggtccctggaattcgatttgaagtatgcggtgacgggaacctccggggtggaggagaggcaggtgctggatgcggagcagtgcagcctgttccagcaggaactggcggagcgggtgcctgcgtatgccatccgttccattgtgatggccgtggtgcactccaatctcccggcggatgaggcgagaagtgatttttcctccctgcttgccagggaggaacagtggaaaaggaatttctgcctctacctggggaagaagatcactgcggctgtttccggccatgagggggccctcctgcgggcggactccggactggacaagggattgctggcggagcttctggcggatgtggcggagaaggaattcatggacaatcccgatctggccgacctgttccagggtgcccagggggacgccctcaggcaggagtgccgcacgaacctccgggaaggcctctcctccttcattgacgtgcttgcggaaaagtatgcgttcacccggcaggtaagcaatgtggtggtggacgtggaggtggagacggagaagctcaaaaagatgccggagaactccatccagacgcttcacctcaacatcgcgcccgccgccgttcccgccgtcctggcggagcagaatgacgtttccggactggccgcacaatagtgatattattatgagtgattctacaaacaacaaggtgaacgggcacatcatgagcctgcagcagttgatctcggccccgctggtcgcgacgattgatgcggacgcgatgtccacggaacgctacatgaagcatttcatgtccctggctttcgagtcctacaatcctgcggacggttccacgggggcgctgaggctcatcagcttcaattttacggacagcgacgcttccggcggcgcggagaagaaagtcagcgtgccgctcatcagcctggtgacgctgccgctgctgcaaatcaagcaggcggactttgactttgacatcaacatcattgacgcggtcgcctccgctccggatgaacgcttttccctgaacaagggcgaggtggattcctccgccggaaaggggcaggatgacggcctgaacttccgcgcttccctggcgccccagtccgggaggggttcctcctcttcctccctacaggcgaacatgaaaatccatgtcaccatgcagcaggcggacatgccttccggcctgtcccaattcctccagctgacctccaggccgcattatgaagattctccctcccaggagaaaaaataactaattgaaagaaaaaaacatggaccagaaaaccacttattcctaccagcgcactccggggcttgactgccccaaatgcggagtgtatttccccacgaccattccggacctgttgtccggcggcattgaatgcccccactgcgggctgaagctttccattgaccggaaggcttccgaccacgccatgcaggccctggaaaagttccaggccaccattaacaagcaactccccgccgcctccctgtcatgaagagactattgatcatgctgtccgccgtgctctgcatggctctgccccctctttcccgggcggagatgcagcagcgggaaccgcgccagctggccgccgcatggcaggaggtgaagaagcaaatttcaggcgacggccagtccatccgtgtgagggacggcgccagggcgcttgaactgctggaagagctgggcgttttctccgttccggaggatggcgtgaagctgtcccgcggcagcctgaccattaccgtcacgcgcgggaagaaggaggaccgggtgttttatgtgctggccgtcacggaagaggacgggacaaggcgggaagtgaagctcgttcccccctcctgatgacgcgggaagaatgcgttccttccggggggaaggttattcgctctcaaaatcccacacgcggcggcgggcgtttttcttcgtccgtccgccgttggccttgcggaaggggtcaaaaagaggatccagcccgttacctttcagcagcaggcactgttccatcaggcagccaagttttcccttgggaaagcccttggcctggaaccacgccaggtattcctggggcacgtccatcagcgggcaccccttgggcgggtacttggccgggccgtacatgccgaaggggacgtgggtctgcgcgatttcctccaccagttttctcaaatcttccgcgtccggtattttgggatcgttcatgggttttgcaggatgaattgttgaaggctttccgccagccgcgccggagcttccagggggaggcggtggccggcgcggggaatgatgacggcttgttcccccgccgcccggcgggccagggcagtgaatttgggatcacgctccccggctatccataactggggaacaggggactggttcaggagcggggccaggtttttctgggcgcccacggaccagtcgatgaaagcgcgggagatggatttgcgccacggtttcagggaagaacggtccggaggcggcgggccgccttcaaatacgccctgcgcgtcccattccttcaaaaaatcctcccatggcgcggagaggcacttgacggcccattctgcgtccttcgcgcgccgggccgcttttgccgtttcatcctccatgccgggattggcgctgacgaatacggcgcctttccagagggggggatgggccagaacggcctgcatggccagcctgcctcccagggaataaccgcagagccaggggtgcttgtcctgggcggctatttcagagcacagcacgcgccccatgtccttcaggctcttggggcagcattccaggtacttccagaggttcagggcgcgggcttccactcccccggcgcgcaggacttccatgacgggtttccagtccgccggagagcccaggttaccgtgcaggagccaaagcatggtcggcgcgccttcctatttcacgccgtacccggcgagtccgttcataaacatctggacggaaatcatgatgagcaccatgcccatcatacgttccagggcgatcgtccctttttcccccagcaggcgcaggaacttctgcgcgatgaaaagcaccagtccggagaggaaccaggcagtcacgatggcgccggcataggtcatctgggagatgctgtccgggctctgggaggcgtgcagcatgatgatggccagggaggaggggccggccatcaggggcatggcgatgggaacgatgaaaggttcgtcctgtccggtcgtgcgtccggcggaagagagcatgtccttggcgggaaagaccatgcccagcgccacgaggaacagcaggatgcccccggaaatattcagggtggacggttccagccccagcaggtccagcaggaatttcccggagaagaagaacaggagcagcaggctcagggcaaacacaagctcccgcatcagaatggccttctgctgggcggccgaatatttcttcagcattccctgaatcatcggggccagtcccacgggatcaatgacgatgaacaggagaataacggtggaaaggaagtcctgcatggagtaagcccgttgtaaacgatacgggcgtgcacgtcaaagggaaccgtcggcagcggaaattttccccgtccggatggccgttttctccaccagttccggaaatgggtttttatatctggaaagcgatttgagggactttgggaggctttgcgcaggagaccatgggatttttaggagaggtaataagtgttctagaatgacggtgtacaagtcgagcatgtgcccgaaatggattgtataagctacttccggcatcaggaggcagtatttttaccgcctccaaggcgattgatcaaccaaagaaaaatctgccctccctacatattttctccgaacaccccgttctccgaatccgtcccagaagtttacttccaactcgtatctcttgtcattgcggagtaagtcgagatatgtcaataataaataggcattttggataggcacttcatgtttctctccgggttccagagtaatgaagtgtatggagttcgctctacgttctatcagatatggggctccataccaagctatggctttttccatctttttcccgtttcccagttttaagtagatatatatggaaatattcgggccattatccttgaggggatagaagtcgtcaaaaaggcgaaccgtcttttcgcccttgttcgtgaacaccagcttgaagtccgggaaagcctctctcgcgtcaaaccgggttttttccatcacaacggaacattcaatcccgttgtcggccatgtccccccatgccgctgcatggagggacaggcaaaccaaaattcctaaataccggaagatttttttcatcacagcgagagtttggccgtcgcccggagagtccccaggaaacaatccttaccctgctgattatagtagcgcgtttcgagttcacaagaacattgtttccaatcttccagctcgacttcatcgaggaacaccggaatcgtgacgctgtattcctggccgggggaaagctcccggtagttcaagggacggttgaaggtgatttttcccgtttcagcattcaggatgcggacgttcccttgttcgctcctcaacaccgtcaggaagaaataatcagccgtttcgtcgttgatttcatcgggaatgcggacaggctcatttccttcgttgcggaagcacagcgtaatcctgccttccgcgaaccgggaagtatccgcaatggagagcttcaggggggacggttcctccgcaacggccatgctgcgggtttccccttcgctgaccggaggcatgaaacagggcggctcaatagctcccggttccgtgatttgatcgggtacgttgctccatccattggctttcgcctgttgtatgacttggcgggtagcttcattcagagcttgttgtccggcacagtagggacggtcattggcatcgtctggtaatcctctgacataattatcaacttcaaaccagaagcgctccgtccaagtgttggcatattcttgcgcgaattggatgacagtatccatgtcggggacattctcaatattaaaagtcttttcttcaattttttcttgaatcttcatgtgcttccagaaaaacttgcctgcatcttcgtattgtcggcaatggtgattctcatgagccgaggaagcctcctttgtatgccatgctcctacccctggacgagattgatagccgttcattgagttaactgctgtaatggcttctgcttcggtcttgggagggttaagcgtagcgtccctgtaacctccagtgcgtataacaacgtcagcacccccagaaacagcgacaacacgcgtcctccaaagtttggccgcctcatccttgcaaaccgttactacggtagagggtttagttcctcgtgttgtgcaggcgttatcttcatcaagataggtagttttcggttttttaaattcatattcgacttccttggattcttcgcatttgatgtcggattccctttcaatcgtccacagcttgattttgggagaaggcgaaaattcacgcttcatcgtggaatctccttcatatttcccttcctgaatcggttccttgtccatcgtgacgttgaacgcgatcgcgttgttgctggtaggatcataggcgttgttggtccacgacaaggcaaccttgtaataaccagctttcaaatatctggaagccgttttgatattcagcttgccgttgggtttatctcccttcttttcgcaaagcttatcaccagttattgtaatactgccggagtcgtcggcctctacgccgaagtaatacaggccgtcttcttcgaccttgatgaacatttccggagcaccgggacaagtggcgtgttcacacgccgacccgtcaaagttgaacgtcatcgcatcgactccgagcttctgagggatgagagcctggtacccgtcgcagatgaccttcgggccaacagccttgtttagaggaatatagttattcattttcctgatcgttttttgtttctgaaccaaacgtttagttcaccgggaatcatgaagagttcctgggccagcaacaacacgcctcagacgtgataagaagacgaacttcgaccgccttcacgaaaagactgccaaatgaatattctctgatctatgccagaaaccaccccggttcaatccgaaggtttttacagaacaaaatggatgctttgacaatcgattcaaggaagaaaaaacaggaagcaatccgaagagagaattgcaaatgctctaccgattccagggcgattgatcgaccacggagaaattttctctccctacatacttcctccaaataccgggatctccatacccatcccgaaagattacttccaactcatagttctcaccattgcgaagacggcgtaaaggcccaaaatagtgcatcaacagataagcatccttaatgagcacttcatgcttttctccgggcttcagcgtaataaaattcaagaaacgtcctcgttcaatgcaataatgagggtaatatgctgctacctttttccttttctcttttcccagttccgaaaaaatctctatggaaatatgcggcccgtcatccttcaggggatagaagtcgtcgaacaggcgaacggtcttttcgcccttgttcgtgaacaccagcttgaagtccgggaaagccgccctcgcgtcaaactcggtcttttccatcaccacggaacattcaatcccgttgtcggccatgtccccccatgccgctgcatggaggggcaggcaaaccaaaattcctaaataccggaagatttttttcatcacagcgagagtttggccgtcgcccggagagtccccaggaaacaatccttaccctgctgattatagtagcgcgtttcgagttcacaagaacattgtttccaatcttccagcccgacttcatcgaggaacaccggaatcgtgacgctgtattcctggccgggggcaagctcccggtagttcaagggccgctggaaggtcatggtaccgatttccctgttcagaacgcgcattttcccctgttccgttctcaacaacgtcacgaaaaagaaattggacgtttcgtcgttgatttcgtccggaatccggacaggctcatttccttcgttgcggaagcacagcgtaatcctgccttccgcgaaccgggaagtatccgcaatggagagcttcaggggggacggttcctccgcaacggccatgctgcgggtttccccttcgctgaccggaggcatgaaacagggcggctcaatcgtaccgggctttgtgatgaacctgggtacattgttccaccccatcgcgtcggccagacggatgacatgggcggttgcttcgttcaggacttcctgtccggcgcaatagggcctgtcattggcctgatccggcaacgccagaacataggccgacgtttctgtccaaaggtccaacgccatttcattggcaagcgattgcatgaatttgacggcttcatccatgtccggttcttcgtcgcaggagagagtctccttttcaagcatttcctgtattttggattccttccaatagaacttgtaggcatcctcccattgacggcggtgatgttcttcatgggctagggaagcttgcggcgtgtgccatgtgcccactcttcctcgtgcctggtagccgttcatttcgttgacagcctcaatagcctcttcctcgtcgagaggaggattaaaataggggtcaatgtagcttccctgatacacctttagttcggctccggcagaaacggaaacaacacggcacttccatacgttttccgcttcatctttgcaaaccgtcacgcaaatcttaggtctcatgccctttacattgcagtcagcatgcccttccaaatagacgggttccggactttcaaattccagctccactttcttggacggttcacaggtaatgttggattccttttcaatcgtccacagcttgattttgggagaaggtgagaattcccgcctcatcgtcgagttgccttcatacttccctgcctgaatgggttccttgtccatcgtcacattgaatgcggctgcattgttgctgacgggatcgtaggcattattctcgtaagacagggccaccttgtaataaccagctttcaggaacctggaatcggtttcaatattcagcttgccgttgggctgcgtcccatccttttttatagcttgctcaccggcaatcgtaaggctgcccgtatcgtcggcctctacgccgaaataatacaggccgtcttcttcgaccttgatgaacatttccggagcaccgggacaagtggcgtgctcgcacgccgacccgtcaaagttgaacgttatcgcatcgactccgagcttctgagggatgagagcctggtacccgtcgcagatgaccttcgggccgactgccttgtttagaggaatatagttattcattttcctgatcgtttcttgtttccgaactaaacgtttagttctacgatgaacatggcaaattccagggaaggcaacaacaatcctcatgcgggataagagtcgattcctggaagaatcggccgtctttggatatctgccgtatcatccggacagaacgcccgaaagaaagggaaaaatctttggccgtctcatatgaaaaattggcgtatgccattcattaccagctaatacagttgttgcagttggatgtatttcttcgcaaataggttaattggtgcagcagctaccgggcctgatagctgcgcccttcctgccggataaatcccctattccggatggccgttttcttcgccagttccggggtttggaaactctgccttccgttccggatggagactagcaagacggggggaggcacagccatggccggaagagaaaaggctttataacagtgggggccggggcagcgcggcgttcctacggttccggtgtccggtgttcccgtttgcggagaaaaccggttttcaggaaggcggattcgggacggggaggaaagaaatccggtttgcccggcgaagagtttccgctccctgggccgggaacgaagaatgcttccgtttccggagttacagaaggaggtcctggatgttgtccgaggagatgacgcccgtttccgtggaggacagcacgcagagagcgtccaccaggttttcctggcccagagccagaccggcttcttccaccagcacatcgtcaatgttcagggtggcgatggagagggggggcgtttgcggagcagagggttccatcagggctgcaatgccgatgacggcagccaccagggccgccgccgcggcgccccagatgcggaaggagttccgcttgaagtggtggatggattccgccggaacggcggtggcgtgttcttccccggcaatacgcatcatgaccctgcgggcaaaatcatcccccggcgcaggctgggaggcatggcccagaatctgccagagttttgtatcgtcctgttcgttcattatggtgtttctgctgaggtttccatgaataaaaacaccggaaagcgggtccggtttcttggcggagtcattttttccgttccgccgcctgcctgatgacgggggccagcacggcggcgatgcgctcatagccggccgcggagggatgcagcccgtcgctggagagtttttccggaacgtgtcctgcggcgtccgccatgacgcggcccggttccgtgtacaggaagccctgttctgcggccagacggttcaggaggagattgatggcggcaatgcgttccgcggtatctttacgggcgctgttgcgcgggtagaagccctggaggatgatgacggcctttttcagccttccggtaatttccccgcagacggcgcggatgccctggagtatttccccgtccgtgttttccgcgaggttgttcgtgccgaggagcaccacgcagacggcatcgtccgccgctccgtccagttcgccgtggcggagccgccacagggcgttttccacccggtcatagccgaagcccagattgaccgccctcattccctccgtgcacaggctccaggtttccggagatttctggaggatgtcccggtgcggttcgtccacgggaggccctccccagaaatgcgtgatggagtctccgatgaagaggaggtccggatgcgttttcctcaccgcgcggcaagcggcttcgtgccgggccgcccagtcgtaaatcatgaagtccctgttctgggtgcagggaatcagcgtggaaggaacgggctgggcgggaggagctccgggcatgatgaaggtttccggggccgtcagaccgcgcttcccctggaacaggcggaagcggatgcgcgtgccgggcggggcctgcaccggagccaggtagcggccctgcgtgcagagcatgcggggggaagtcgcattaacgtccatccggatgacggctcccgcaggggcgttcaccatggtgagttccagttctcccgcgccgttcagggcggcgcggatgccgggggttggagatggttctgtcatgagacgtcgcgcatgtgctggcgcatctgcctgcggccgatggagtccggtccacggccgtcctgcatgcagtagtttacgggacggctctgggaggcgccgtgcggagcgcccaggcgcttgtccggttccgacggcagcaaacgcaccactcttttgtttttccagaccagccagagcgccactacggccaccagtgcggaggcgtgcaggatgatgccggccacattggccagggcaaaggacatccaggccttcatcatggcgtgcagatgggattcacgcgcttcctccggctcctggatggtgatgttggcttccgggatgctggcggggttgtccgggtccagcgcgggcagggaaggcttgggggcggaggccatgtccgcctctgtcctccgcgccagggaaatcatggcttcaacaagctcgtcctgcgggttggtgaaccgggaggcgtcctgcttcacctggtacaggaggtcccgccgccccgcatccccgagctgggcgctcaactccggatccagcgcgatctgggcgcttttaatgtcccccatgtggaagtggaggagcaggttccgttccttgtttttgaatatctggcgggcgattgtgggggcgttgacggaaggggggactttctgcccggccgcgaagatgctgacgaacaggttgacgttgtaacgggatttgatgagcttgatgagttcaatgacgtcattgctctccacttccgtgagaagcttctgggggtcgatcaggcccgtggaggtgcggatgtagtccggaaggaagtattcgttgacgtccgtgaaatcctccggaacagggtccacagcgggggagtctgcattggcggagggttccgggacggaggcggaaggggccacagccgcatccacagggggcagaaggggtgcgttggcttcccaccaggtgcccttcatcagggattgctggtcacgggcgttccatttaagggcggggagttcctgcgccggggccacgcacatggccgccgccagcatgaaggggaacagcaggaatctcataggccgcctcctttccggtttgcggggggagggggcgtcaacccgtagcgcatggggtgcctgaccttggagcgcgccttccgggccacgagctggacggcgtctttcatgatagagcccacggcctggagcagcatgctttcccgcagggggatgcgggccttcatgatggatttgttgatcaggtccggctctacgtagggatccagttcatacccccacatgaagcaggccgtgtccgtccgcacgtccagtaccagaatcaggagccactgggggtccagcgggccctggtggctggggaagccggcttcgtccaccgtcaggtggttcatcacccagaagctgtggggaatgagggaaaagggctccagaatgttggggaaatagacggaaaggaggacggggggaatgcggcgctccagtttttccagcagggcgttcagctttacgcggtcctgctgccgcagggcgccggcgttgtcgcatacgcggcggtaggggatggagtccctgccgtatttcttgtccaggttttccagggaaaagccgcagtgagggcacaatgattccgccccgcggtggaaattatgtaaacacttcggacaagtcggcacggggaaagtttaagcacgaaattcgttgccgaaaaggctaattgtcagaaagaaatcatgtatgtctcaatcttccagattttctttcgtcactcggtaaatggcggcgcacctggggcaggtgacttccagcgcctcttccccctggaacaggtcttcctccctttcctgaagcgccttgagcgtcggcaggatgcggtccagcgtgcagccgcagtaaaagcggaaccggcgcgtttccagtactcgggtatcttcatcctcttccagatgggccattttttcccgggttagggaattcagccattcttcatccgcgtccggctgggccgttaccatggtgtagcattcatccggcagttcaatgcagcgcgcgtttctctgttcgctctgcttgtagaattcctccacccaccgggcgggggaggttcccggaatggggacgacggagtaccgcggttcaaagcccttgcggagcagggtggagtacagcgtgttttcctcaggctccttgatgtcctgcgtgaagatgcgccccactacggattccgtcagggaggagcccgtaacgaacaggttggctacggcgggcgttctgaggttgaccgtccaggcgtgctgttccgcccagggccgcgcgaccatgtagagggtgaagtaggccatcagctctttcagcaggctgtcgtagggttcctcgttacgcaggccgtactgcatgagatgaaggtagtagtctgtgaacaggggagagaatttcgccttcagcgccaggcagttgcgcccacggacaaagatggattcaaccgtaacgaattcttctaccaattcttcgctcatatcattcaaattcggccctttccggtagaaaatcaaccgttcctcctgtcattagggcccgtcatgacaggtaggcgccgcgggggcggcctccttgcccggcatggaaaaggaggaaaagaggccggcggagaaatgggggcgcaggcccggcggcagcacgcaatacagtctttaccatgcctttccgcgcgtttaacatgcacccatggcaactgacaagaatatcaccatccacacttccaagggcgacatcaagctgacggtattcgcttccaagacgcccgtgacggcggcttcctttctgaacctggcttccaggggcttctatgacggcctcaagttccaccgcgtgattccggatttcatgatccagggcggcgaccccaccggcacgggcatgggaggccccggctaccgttttgaggacgagtgccgcccggacctcaagcatgacggccccggcgtgctttccatggcgaacgcgggccccggcaccaacggttcccagttcttcatcacgcatgtacctaccgactggctgaacggcaagcacaccgtcttcggcaaggtgacggaaggccaggacgtggtggattccatcgggcagggggataccatttccggtatcacgattgaagatggcgcggatgatctgttcacggagcaggccgaccgcatcgccgcgtggaacaaggttctggacaaataagcttatccggcttttcctggcggcggaacaggcgatgcaacgccgcgttccgccgccttcctctctctactcattcggtacatggttctggccgttcaaaatctgcgcgtgcagtacggcgcgcgcgtcctgttcaatgatctttccttcacggtggaggatggggaaagaattgccctggcggggcataacggcgcgggcaagtccacgctgatgaagtgcatggccggcctgaatgagccggattccggctccatcatcaagtccaggcactcccaggtgggctatctgccccaggagggcatccatgtccgcgggcgcaggctgattgacgaggccatgtccgcctttgcggacctgatggacctccaggagcgcattgacgccctgacgcaggagatggagaaactggacccccgttccgccgcctattccgaagtgctcaacgagatcggggaactggagctggtgctgcacgcccatgattccgcccggctgcgcccccgcacggagtccatcctgcgcggcctggggttcaaggaccgggactttgaccgggactgcggggaattttccggcggctggcagatgcgcattgcgctggccaagctgctgctccgggaaccggaagtgctgctgctggacgaacccacgaaccacctggacattcaatcccagcggtggatggaacagtacctgcgcacctaccggggggccatcatcctcatttcccacgacgtcgcgctgctggattccctggtttcccgaacgattgccttttaccacgggcgcgcggaggagtacgcgggcaatttttcctatttcctgaaggaaagcgtgctgcggaaggagattctgctgcgccagaaaaaggcccaggaacgggaaatcgccaagacgaaggagttcatcgaccggttccgctacaaggctaccaaggcctccctggtgcagtcccgcatcaagcagttggagaaggtggagctgattgaggtggaggaggatgacgccgtgatgaattttcattttcccaccccgcctgccggcgcgcattccgtggtcaggctggaaaaggtttccaagcggtacggctccatttccgtctttgaggatgtggattttgaaatcgtaaagggggaccgcatcgccattgtgggggtgaacggagcgggcaagtccacgttttcccgcctcatttccggcggggaggagcccagctccgggagcgtgacgatggggcgccacacgcagatcgcttttttctcccagacgcatgccgatgacctggacccggaaaaaacggtcctggaatgcgtggaggcggccgctacgcgggaatccgcgcccatggtgcggaacctgctgggctgcttcctgttccggggggacgacgtgcacaagcgcgtgggcgtgctctccgggggggaacgctcccgcgtggcgctggtgtgcatgctgctgcatccggccaatttcctgattctggacgagccgacgaaccacctggacatccagtcccagcaggtgcttcagcaggcgctgtccgaatatccgggttcctactgcatcgtttcccacaaccgcagcttcctggaccccattgtgacgaaggtgctggaattcgtgccgggagagaaaccgcgcgtttacataggcaacgtttccgattatctggagaaggtggagcgggaccaggctctggcttcctccgctgcgtctgccgtctccggagcggctgacccgggagccggggcggaccgcaaggcgcgcaggcgcatggaggcggaaatccgccagaaaaaggcgcgcctgctccgtcccctccaggaaaaactggaacagttggaagcggagatagcgcgtctggaaacggaaaagacggagatcgcctcccagttggaacgtccggaggtggcggctgatacggaggccgtcatggagctcaccacccggttccagcaggcggaccgccagttggaaacctgttttacgcagtgggccgatctttcagaaaagattgaagagacggaagcccgtattgaagaagaggcggaaagaaacgtttccggaaattgagcggatttttatttaaaaaaacaggaccgtttcccggtgggggacggtcctgttttagtaaaggaataaagcagagattaaatgatgctcccgcttatacgcggcggcgcaggagcagggcggccagtccgagcagtccgagggaggctgtggccggttccggcactgcgtccccgtggagggccagttgggaaagccccaggaaggtgcccccggtgttgggtgccttggcgttcacggtgagggtaaaggtttctcccgccttgaccgtgaccggggtattgaaggaggcttgctggatgtccgctgtcggcgtgccgttcttgtcggcctggacgcgttcgaagctcagatcagccgtggcagaggaatctccggcggccagcgtgacggtagcggttcccgttttggaatctgtgtttccgtgccgtgttccggtaccggtgacgaattggaagcccaggttcagggaagagatgatgatgtcctgcgtagccgtgaaggaaaaggtaacggtccatccggcgttgttattctgcatttggacattggggacaaggaggtccgcggccaaattgccggaaagggatgtggaaggattggtgagcgagacggaagcgccgtccagaaagtcactgtccacattgatggcggtctggcggaactgggtttcatacaatgtcgttgccgcctgtaccccggaaatgcacagtaaaaaagctgggatggaaaggagctttttcatgcgcgccatactagcggattagatatccggtaacggagaagggaaaatttttggaaaaaaacgatgtttcaccgcgggcaatggggaataatcagaaatacggaacttcaagatgcatcatgaagttccgtattcctgattattccccattgcaggatgtgttccatcattcacttccattttccgttgtccgttaccggatatctaatccgctaacagccatcctctgggggcggaaagcgttgcaacgccggaggcattccgtccgggaatattcgccagccgtttttcttcctggaaaaaacagcatgattccggaaagcagggggaatcagcctttttgcagaacgggcttttctcccttttctctgacgctcttccgcgtttttttcctgtactcggaaatcgtgacgccgcagagggtcaggagaatccccgtcagggatatccaggtcaggcgttcccccaggatgatggcggaggccactacggccacgaccggaaccatgtaaatgtacacgctggatttgacggctcccaggatttccaccacgcggttccaggagaggaagcacagggcggaggcaaacaggcccaggtacagcagattgagggcgttgacgggcttcaccatcagatgccagtccatgttcaccggaaggacgaacagggccggaatcatcagcacgatgccgtaaaagaagatgcggcgcgtgcagatgatcatgttggacgtgttgacgccgatttttttcatcaggatggaatagaccgcccagacgaaggccgcgcccagagccagcacgtcccccgccgggttcagttccagcacgaaggcgccgttcgccatgatgaggaagatgcctgtgaaggcggcggcgaagcccaggaagaagcggcgggagaagccctcccctttcagcaggaagtgggccagaagagccgtgaagaaaggcaccacggccacgatgatgcccacattggaggcgaaggtgtacgtcagggcgatgttttccagcaggaagtacagggtgacgccggtgaggcccgctcccgcgaacaggagttcctttttccagccggagagcggaagcaggcgcggcttcaggcaccagaggaaagcgtacccgatcacgaagcgggtgaagagcaccgtgacgggggtaaagtcccggagaagcaccttggtggacacgaaggtggtcccccagatcaggatggtcatcagggcggcggcatggcccagcgtgcgttggcgggagttcatcgggttgtaggtagttggggggcgcgggcggcttccagcgtaaggcctacgatttccgccggttccgcgctcctgttccagacggcatgacggccgccgccgggcacgagcagggattcatgctcacggaccgttttttcctcttcgtcaagcaggataacgaccgttccgcgggtgacaatgaataaatgggcgtgggcgtggcggtgcggggaaagagggccgccgcctccgggttccatgttggcgaaggctccgtccttcagggttccctgcgcatccgtgaacaggctcctggccgtgaagcccgtgtggttggggataggggagaaagcgtccatgccgttcagttgcgcgccaggtcgtatccgtccttgcggtccttgatggtccagcccagcgccgttacttccgcccgcaggcggtcggcttccgcccagtcccggttctgcctggcctgccagcgctgttccgccagggtgcgcacgttctccggcgcttccgcctgttcctcttccggcagaagaatgccgaaagcggccagaatgaagtggaaggcgttccgcatgcggcgcgcttcctccggagtcagggagggaacatccgccttcctgatggcgctgaagacgtggcccagggcttccggagtgttcaggtcatcattcaggctgtcccaggccggctggaagatgcccggttccgggggggcggcgcaagattcctcataggacggaacggagtccgttccggaggcgttccggagctgcgcgtcgaatttggacaggcggttcagcgcggctttggcgtcctccagggaggaaagggtgaagttcagcgggcggcggtaatagccccctgccagcacgtaccggacggctgacggcttgtggcccaatttatccaggtccgccagggtgtacatgttgcccagggatttggacatcttgccgccgtccaccagcaggtgcgtgatatggaaccacaggcgcgcaaaaccgccgccgcaggcgcagcgggactgggcaacctcgttttcatggtgcgggaacaccaggtccacgccgccggagtggagatcgaagtcattgccgaagtatttgtggatcatggcggagcattccaggtgccagccggggcggccttccccccagggggagggccagaaattgtccccgtcttcagggcggcggcttttccacaggacgaagtccgccacggagtccttttcatattcatccgcgttggaccgggcattggcggttttgcccagatccagttcccgttcatccaggtgggaaagctttccgtattccgggaaggaggagatcctgaagtacacggaaccgtcttcagagacataggcatggcctttttccaccagagcctggaccatccgtatctgttcgggaatgtggcctacggcggagggttccacgtggggtggaaggcagttgagggcggtgcagtcccggtggaacaggtccgcccagccggcggtgaattccgccagggatactccggctttttgggaatcccggatggtcttgtcatccacgtccgtcaggttgcggacgtgcatggtgggggttccgcccagctccagaacgcggcggaaaatatcctgcatcacgaaggtccggaagttgccgatgtgggcggggccgtacaccgtgggtccgcagcagtagaaacgcagcgtttttccgtccatgggggaaatgtcctgtgccgttctggtgcgggtatcgtaaaggtgtaacatggcggaacgattagaagggaagagggccctccggtcaagcgggaaaagaaggccggggacctgcggctgcgcgcgtccccggccttgaaggaatcagatggtggcgagaggctggaaaaggttatttgcccgcgtcctgctggcccttcttatagttcgcgttgatgcggtctatttcttcctgggtgatggaggattcccggtagggtttgttttccaccgtgcgttccagggtgtagccgaagcgcttctggaagcgcttcttatgggtttccatcttcttttcaaagtcttccaggctggggcggtccttatggctgccccaagcggtttcagagaccgccatggcgcgcggataggtcatgtacatcagcagttccccggagggaatccattccgcccacatgcagaggttgatgcccttgatgtgcttgacgtcgttcttgtcacgcccgttgcgggggtcgaagttgtagcagtctttcagcaggatggggccgccgccgggccgggcgcgcacgtcgtccgccgggaatttcatctgggtgcgggccaggtagtacttgtactggggagtgacgatgaggtcgatgccctgttccttcgtcttgtcaatgcagcgggggaattctcccggcagccaggacatgacggtttcccccttgtggtagtagcctttgttgatgtcgtaccacaggatgggctttttcttgttcttggcaagcatggctccaaggctcttcgtgaagtcgctcatctgggcttccacgtcgtccccctggcccttcttggcgcgcgcggcctggcagtccgggcacttcttccagtcgcccatggggcattcgtccccgccgatgtggacgtacgagaaggggaatatctggttgacggtgtcaaaggtgtccttgaggaatttcttggtgcccggtttctgcgggcagatcagcttggaggaaacgccgccgtgcgtccatacctgggcccgcttggtgttgcagcagaattcggggtaggatgcggccagggccatgttgtggcccggcatttccacttccggcagcacctggatgccgcgcgccttgcagtaggccaccaggtcctggagttccttcttggagtacatgccttcattggccagcagggagttgttctggccttccggagcggaagggcggaccgctccaatcgtgcggagcttgtcgtagcccggcacggggaggcgccagccctggtcttccgtcaggtggaggtgcaggacgttgtacttgtagtagtgcatggcgtccacgaagttgtagagctccttcatcgggtagtggtagcggcccacgtccaccatcatgccgcgccagccaaagtccggggagtcctggatgctgccgcaggggaggccctccggcgtgtccgagagctggtcctgaagctggagaagggtagccatggccatggctttcccgttgggcgtgctgtagcggagctccacgccgccgggcgtcagcttcatggtgtagccctcgtttcccagcccggcgaccttctgttcgttcaggattttgaggtttttggtggtgccggaggccgccgtcactttgacgggttccggaatgatgttgtagggattggttccggcccagcagagggagcccaggaacgcggccgctagcattaatgctttcatgtgatgatgtttggtgatggttgttgtttgggaggatgtacggattccgttccgccgccgtccgggttggacccggaaagcgttctttcaaaaggaaccggggcgtggaagttctcagtctttggcgggtgcgcagtcccactgcggcttgacggccagcttgcccgtggctcccgggaagccttccggcacctggcagtccttgcggagcttgccgtacagttccttccagctccttcacggtttccgcatattccggtttgttgatgacgttgtgcatttgggccgggtccttctggttgtcaaaaagcatccattcgtcgctggtccagatataggacagcgtgtagcggtccgtgcgcaggccgtcatggcgcggagcgttgtgttcacccggattttcgtaaaaagcgtagtaaagagaacggtttttgaaatcctgatgttctccggtcttgaacaggggagtgaggctgcggccctggaaggtattcatattttccttggtatttaccccggctacgtcgcagaaagtgggagcataatccagttcctgcaccatggcggaggagcgcacgcccggcctgatgtggcccggccatctcatgatgaggggcatgcggaaggattcttcaaaaatccagcgcttgtcgtacaggccgtgttcgcccatgtagaatccctggtctccgcagtagagcaccagcgtattcctgtccaggccgttctgtttcagatagtccatgatctggccgacgctttcgtccacggaaagaacggtgcccagatagtcttccatataatggcgccagcggcgcagcaaaatgtcgcgctgcgttttgattttcccgtttttaatatctttgacaagctgtacagtacgggccttgtgatagttgtaccaggcttccttctgctgcgggtccatgcgcacccattccggcatttcccagtcatactgagtatgcagggtcttggattccgggcaggaaagcattttctggatgtcttccgggaccacctccttgatcaggtgctcgtcagaccatacgttgaaatggttgagcagggtttgttccgtcattttcaggaattccgggcggtctgcaaaatcgtcttccagattggcgggcgggtcaatggcgtccgcatactgtttggcgcggcccagattctgaatggaggggcaccagcaacggtggggtgccttgtggcccacgacgagcatgaagggtttgtccttgtccctctggtccagccatttgaggcttttttgcgtgaccagttccgtggcatagccgggttccgttttcaccacgcgtttgccgtccttgccgggagtgatgaaatccggattgaaatagttgccctggccggggaaaatttcccagtaatcgaatccggtggggtcggattcatatttggacgtatctcccttggcgcccggcggaatggcttccaggtgccacttgccgacaatggctgtctggtaaccggccttttggagcattttcgggaaagtgggctgggaaccgtcaaagggagccgcatgttcgttgaagaggtacccgttcatatgggagtggcggccagtgtaaatacaagcccgcgaaggtccgcacagggagttggcgcagtagctccggtcaaagaccatgccttcgtccgccagtttgcggaagtttggataaggcatgggagaatccttttcacaggtgcccagggtctggtaggaatggtcgtcggtgacaatgaccacgatgttggggcgctggtccggcgtctgcttttgaggctggtccgcggaagcggacaggggacaggccgcaagcatcagggcgatggcggcatgacggttcattgttaaaatcatgaattaaacaggcaatggttggagagggggaagcggcggaatttgtccgcaagggcattcctgccggtacggaaaagaccacatccccgaaagaaaaaatgctggaagagagttttaggaaaaataaaacatcagtttcatatttcaatacaaaaatggggatggagcggaagcccatgaataaaccgttccgcagccggacggcaggggaaaagccgttcaggtgccacgtgggccggagcgcttgttccgaccgttgttttcatgggattctttctgttccaggagccatgttctgtcttcaaggctgagccttttcagggatgttctgctctggtgtccgtccagctcctgaagccagagggtctgggtcttttccgaataacgggaaagcttggcgaagacggtatttccgttgactcctgtccagacccggtagcctttgggaatcagcgtttttttaaactcttcatattgttgcttcgccagtttgacgctgttcttgatctggtcaaagtaaagggcgttttgtccggtgtagtaaccgcgcagcgtatccactttggagccgtccggagacatgaccagaagcacgggcgttcctctcacgccaaacagggagggagcctttttcacatactccagcatcttctggcgcttcctgtaaacaggttcgctttcaaatttttccgcctggtcgtaacagacgcggacgacattcttttttgcccagtcttcaaattccttcgtatggagaagttcggttccaagttttttgctgggagggctgcccacggaatggtggaaccagatgagaatgggttttccggaactctgggcttcccggagggcggtgggatagctttgaatccagcgttcgttttccttacgctgggcgaaagcctcttccagcccggggatgggggcgtccgggtcatgagcgtccgtgtaatagatggccccactgtctgccttggtcatttcctcctgtgtggtggcggtaagatgggtggcctgttgctgattcggagtagtgctcaacagccccgtcggaacattggcgatggaattggccttattgtcctgcatgtattccgaaaggcttttttttaccttcggttcttcctgttccggagaggtccctacgcaggagcagagggcggcggaagcaagaaagagcatggacagccttggcagactcatgactgacctgatagcataacaggaaaaaatgcgcaaccgggaattgttcaacgactgcggcggtttcagtgtttcttggcgtcctgttccttctgcttccggttccgtatggcgataatttgctgacggcgtgttaccacgcgcgtgacgtctccggttgttttgccgtcaaaaagaaagatctgctcgtaaatacccatcctgacctcatcctccccgctggcaggggcatgaatgctcgccaaaacacaggccgagagaaccccgggaaaacagtctctccatgttcaaacggagaactgatataaaaccgggaggaagagggaaagcacccgtttagcggccctgtggaaagaaaatgggttaatcccccgttttcagcaccttgatgaacgcttcctgcggaatgttgatttttccgatggccttcatgcgctttttgccttccttctgcttttccagaagtttgcgcttgcgggtgacgtccccgccgtagcatttggccgtcacgtccttgcgcatgggggagatgctttcccgggcaatgatttttccgccaatgcaggcctgaatggcgacggtgaagagctggcggggaatgacgtttttcaggcgttccgccagttccctgccgcgggaggctgccttgtcctggtgaacaatcatggagaaggcatccaccggttccccggcgatgagcatgtccattttaatgagcttggcggcctgatagccggcgtattcataatccatggagccgtagcctcgcgtcatggatttgagcttgtcgttgaaatccaccagaatttccgccagaggaacggtgcaggtgagcattacgcgcatatcgtcaatggtctccgtattgtccacgctgccgcgtttttccaggacaagctgcatgatatccccgatgtattccccaggaagcataatgaacaccttgacgataggttcccggatttcctgaatttcctgcggttccgggagcaggctgggattgtccacattgatttcctctccattggtcttggtgacctcataaatcacggaggggtaggtggagatgatatccatgttgaattcccggcgcagacgctcctggatgatttccatatggagcaggccaaggaagccgcaacggaacccgaagcccagagctacggaagattccgcctggaaggagaaagcggcgtcattaatctgaagcttcgccatggccgctttcagggcttcaaaatcggaggaatccaccggataaatgccggaaaagaccatggggcggatttccttgaaaccgggcaggggggatgggcaggggcgcatgtaatccgtatacgtgtccccgatcttgacatccgccgcggatttcatgttggcgatgatgtagcctacgtcgccggcttccagggaatccgttcgggtcattttgggggtgaagatacccacttccttcacttcatacacttcgtccgttgcgaaaagtttgactttcatgccgcggtgcacgctgccggaaatgacgcgcacataggagactacgccgcggtaggcgtcgtaaacggaatcgaacaccagggcgcgcagaaggccgtcctgctccgttttaggcggagggatgcgctgaacaacggcttccagaatatcgtcaatgccgatgcccatcttggcggaggcatggatggcttcctcatgggggatgcagacgatgtcctccagctggcggtacactttgggcaggttggcgctgggaaggtcaatcttattgatgacggggataatggccaggttcagatccatggccaggtgcatgttggcaagtgtctgggcttccactccctgggctgcgtccacaataagaagggctccctcgcatgccgccagggaacgggacacttcataggagaaatccacatggcccggcgtatccagcagattgagcttgtaagtctttccgtccccggccttgtagaaaatggtaacggggtgggacttgatggtgatgcccttttcccgctccaggtccatggcgtccagaagctgatcctgcttctcccgttcggaaatggtattcgtcttttccagcagccggtcggaaagggtggtctttccgtggtcgatgtgagcgataatggagaaattgcgagtcagttcaatggacatggtggtctctacccttctaacatgagtgccctgtgcgcggggagggtaacatagcccatgcggcggtcaagacttgaacatgactgcctcccgttccctgccgcgtcggcttcattcgctccgggaaaaccgtcattcatgacaggggctgcgccgggagattgaacgtgagggaagaaggaaggctctcaactggtacaggcacgcgaaccttttcccgtgcggccatttcttacccagccagcatatgaaatcttttttagcagccattttaagcctatttattcccggcctcggccagttgtacaagggccactttgtccaggccattctctggttcctggtggtaggtgcggcttacggcctcctgtattggttcatctttgcactcgttcctattgtcctgcatatcatttgtattttgcaggcctatttcatggacaatgaatgatgcctgccgtttcggcttcacggccaggatggccgaaagagcagagcatcctgcggaccggcagcggcattcattccctgaggttgcggaaggaatgcgccgttcatagcggcgtcattcttcttgataccggtatttgcaatgttaacgggtttgttggtgccagtggaatccgcggattcttttttaacggacttcgatttgtttacaggggaaacgtcagcacaactgttttgaatttgttaatgaccccgtctgtcttgaaaaatcggatcggatgggagacgttgattcttcaacaaataggattttgaatccggtatcaataaaaaaaattggtggtaagaaaattatagaaatcagtattttgttcttaccgatattctatctataatttttgatatattatttattgtaattttttaacaataaatattttatcgataaattcggattcaaaatccgctatctccgttttatagttactaacattagtaaacgatgaaaaaaatactgggaaccacaattgtattgctgggggctgccgctctttccgcaacggccgcaaccgtccagattgatctgtcagggtatgattcaggaagcgatgttaattcttccttccaagcctaccgtggcgatccttccgccatggcgaatcacttgaatgagtggttggcgaattcttccggatggtgcggatctaaagccaatacatcttctgaaacctcaagttattttaaaagcgctgttgggaacgaagacggttctgtaacggtgacctataccaataggcagggatatggcggttccggcgtaggcctcaaagtttccctggatgctgcggggtattctgctgatgctttttcttctctgacattcacagtggatttggctacctccaccggcggcacttatcgggtttatctggcctaccagacggaaaatggctggcaggcggtagagtcgcaggcgacgtccggcacgattactgtgacggcagatctttccggaaacaaactgacttctgaaaacgtttatgtattcgttgagtcaaatcagggaaggggtaatgattctatattcacggcttccatgacgggagaattggcttcagtgccggaacctgccacggcttctctgggactgctgggactggccgccctgatggtgcgccgtcgccggtcttaaggcatcctgccggcagacaaattaatcataggatggtctccgcatggaggccgtcttttttatttttactggagggggataacagaatgcaatgtaccgggaatcgagtattcccggctatggaaagaaaaactgcccggaaaattgtttttcgccatgcttcagatttattcttccaaatagagaggccgggatgtttttgttcttcattcggatgttatctttgtttttggaatttttttacagagcaggtttcctctggaaatgaatgagaaattgtttcctaattgatcatctgccggatacaatggtttccgcaacagaaatgttgatatcttggccgtttgttcttgtaaaacgtcatttgaattaatcgtcctttttggaaacaggtcaaaggaataatcttccgataaacaaaaactcagagccgttccggagttgttccggagcggctctggagggccaggaggaaggcttttcgggggtaggtggggtgccttctccttgggttttctttcttttagaagtcgtagcggtagccgacgcttccgttgaccgagctggacccgtcacggatgtccgcgttcccgttcacgtagatggttcccttcgttcctacaggcacgctcagtccggctcccagctgcagcgccgtcgttcccgttttcgcccctctcacgctttgcgcgaagccggggttgcccagcagggagacgttcgtttcccctctccggtctcccaggtcctgcgccgcgttgacccggatttccgccagcgattcccggccgaagatgttgctgcctatcagacccatccaacggccgcccagcgccagcgtccccgtcgtccagtcctgccggccgacgttcaggcccgcgttgcccgctcccgtttcctcatagccgtccatccgcgtcgtcaccaccgaggcgttgaacagcggctgcagcacgctgctgcggttttcgtcgaggtacacgtcgcaggtgagttcgtacatcgctccaaagccccacccgctggtgcttccctgcgtcccgtagcttccttccccgtagttgaccgtacggttgagtttcgcgtcgttccatcctcccgtcaggatgagcgtgtgcgcccagcgtttgttctgatagcgcccgaagaggctggcgtagtagctgtccaggtgcccgtcggcgctgtccgccgcgctggccgtcaggtcgccgtagccggccgtgaaggccgctcccaccgtgaggcggtcgctgaggtccgcgtccatgcccacggtgcctccccaggtggtgagctggtagccgctttcatcgccacgggtgtcgagtttggcgtaggagcccgtgccttccatccacatgtggaagcgggggaggtcgtcgttgacgtaggccgggttgacgcccatgagggtggtccggttcctgatccagcccatctggtcgcgcagggcgtccctctgtgccgtccccagcgcgttgaccgtgctcccagccactgctgccaaagccctggatgcccccgccaagtcgggattatctcccgtaatcatggtgctgacgccgttcatgaattgggccagctgggagtcggggtccaggtttttgcgggcttcccagagcaggccggctccggcggcggagttccacgtgtcggccgcggaggcgaagaggttttcctgccggagtgtggcattgagcaggatgtcgtttccgtcgcggctcagtgtggcgtcctggtagtagacggcgaagaggccggatatccgggcggcgaggctctgcccgtcttccaggccgctgatgctgccggtagcgctcatcaggacgacgtcatggaggtcgctccccgcgttcatggccatgttggagaggaggaagccggctccgtcctgcacggtgatggtgcccgccgtcagcatgggggcgccaaagggggcgtcctggttgaagttgtagatcagttccgtcgtggagccgttctggaaggtgatgttttccacgttgagcgtggtgttggcgctgccctgggcgtccccggtggcttcaatacgcagggtgccgttgtttccggcggtgatgctgttgtagttcagcgtgggggcgtccgcggcgcctttcaggaccaggacgcctccgtcacggacggcgaggtcgtagtccttattgccggtttgcaggtattgggtggcttgcccggagatgtccagggtgccgctgcctgccagcgtgccggagaaggttccggaggaggttgttgccgaggagatggagaggcggcctccgttcatggacagggtgccgctgccggagaggctgctgatggtgccggattccgttccggtgagggtcagcgtgccgtcggcggtgactgaggttccgtccagccgggcttctccgcccagggccagttccgctccttcctggatgcggagggtgccggttccggtgatggagccgtcgtttatttcgcctgttccagtcaggttgagagttccctggatggtcagggagcctccggcttccgtgccggtgatggttccgacttcggcgttgccgttgatggtcaggccgcctccttccagagtgagggtgtccagggtgtttgacgcgccgttgaggacgatgtttccttcacgcagggcgagggtttccacgtccatcgttcctccgaccgtcagcgtcccggttccttccttgatgaaggcgacgttgttgcctcccgtgatgctgccgcccatgacggtgtcctggccggccgggtcgatatcgtcttctcccgtcgtcatttgtttgttgttgaggatgacgacggccgtgccgtctccggtgttgttgacgactaggctgctgcccgtggctcccatcaggttgttgattttagctccctgtccgtcggattcgcccggggctccggccaggttgaccgtcagggtctggccgccgccgatgacgacgccggcgtagccggagagcgtttgataggagttgacttcatgggcgtttcctccttcctcctgcacgcggtagaggccggtggccgctccgctgagcaccaggcttcctccgtccgttccggtgacccggatgccgtagttggacagaaggtcggtcgtgaaggcgatgtcgcccaggtcgccgacggtcagcgttccgctggtcagggtcaggtagctggaggagtcgtcggttttgtggtccagcagaaggttgacgacggcgtcgttgctcaggtccagcgtcagcccttccccctttatggacaggttcgggtcgcttcccgttccgctgccgttgctgatgacggcgccagacgcctgcgtgtcctggccgatgttttccgttcccagggcgatggtcagtccgtccaggcctccttctcctacggttacggttccgctgactccggtgagacgggagccggaggcgatgttccacgttcctttcatatggctgccgccggcgccggagaggttcaggctgccttccgagatggtgattccttccgtggttccgtcaaggatggtttccgctcctgccgcgtccgccccgagtgtcagggttcccgctcccgttttggtcagggccgggctgtcggtcagcgcgtagatggtggccgaggctccttcctgcgcgatattgatttcatcaaaccgggtgaaggtgacgttttggaagtccccggttccaaaggttcccttgagttccagcgtcctgtttccttcgaccgccgctccggcgcttccgccgatggtgatgccgctttgttccccttccgccccaaagacgcttcctcccgtcagcgagacgaggacgtcgcctcctgccgtgccacagttgcccgccccgtagatgtctcccaggtaggcgcctgttccgagttctaccgtgatattgcctgcagtggtcatggtgctgcctgtgtttcctggcactttggagtaggagccaccgtagatgttgccggtgaaggtggagcctccgctaatggagatggaggaatttcctccaatcgtgtattgggcctggcctgaattttcaaaggaacccccaatgatgtcccccgtgaaggtgattccttccctgccgatgatggaaacggaggtgtctccgttgatgttgttgaccgttccggcgttgtttacattgccataactgccgccaatgattgttttgacgaagctgttgtgttcctctgttccggaaagcgtgattccgttcaggttgattgtagccgacgtgctgccttgaatcgttgttccggaagtggtattgcttgaccaggagcttcctccgatgatgtatgagttggagagtcccccatccaggttctgggccgtgttggaatattggacattggttaccagcacgctcgtgttgcccgtgatggtggtgacggcgttgtgggcggaggtgctcccgccgatgatggctcccgccacgatggcgttatccttgacggtaacgttggtgtttcccgttaatgttgtagacgctcccttgttgttcccgccgatgacgtgttccgccgtggcgtttccggaaagctgcacatgggtgtctcccgtcagcgtgctggtctggaggttggtgctccattcattggtgacacctccggcgatgatgccgaatgctcctccgttgatgtccatccagatgtccccctggtagttgaggttgccggacggcagcgtcgccccgctgttgtataccccggacaggttgattttggttccgccggtgttggtgatttgatagactttgtccccgctcgtcgtcagcgtaccgttcagatagcccaggctgacgttggccgcacttctctccccaagagccagcgtaaaggcattcttgaccgttttttccaatgtccctcccgctcccgcagatacccacgtcacacgggatatcgcctcgtcttctatcgtcagcacgctgccttctattctatattgccctgtctctaagcccaatacggtaaaattcgtaccaaggttgttccctaaatcaaacgtgtatccctgctctccctctaccaggctgtcaagcgcgccgccgatgtcaatggtgcctgaagtgaaagttacattttccttggtaaaggaggaaccggattccgtataggttagcttggctccgtcaattgctgcgtttttcaatatgccggtgccgttcatgttcagaacggaatttgcccccagagtggcggaggtgaaatccagcgttcctcccgccatgatgattattccggaataggccagggaagaattgttgattttcaaggtgccaccttgggccgtaatattcgcgttgatgacggttcccgtcaggttttgcgtgcctgttccggccataatcagatttattcctcccgtgggagtagtgttgccgtttactccggaatgctgcgtggttgccccgatacttcccccatacgtgtaatttccgttgcccgtcagggtaagattcgctctggaggaattagccgactggacgcgtcctttatgtgttccgccgaagccgtcagcatcatttaaaccggccagagaggcggcattggaaatttgcaacgtcagggcgctggaactttgattgattgagcctgacaaatctaccgttgcgttggcgagagccgttcccgtaatctggagaatggccccgccgggctgcgtccccttctgggaaaggataatgttcccggaaaaactgctttcctgggaaccaagcacaaacttggaggcatagccggcattgccgttagccgctaccagcgtcaaatttccttctccggcaaatgccccgttcaaattgatggtacaggcgccgttcgtattctgattaatggtaaacgaggagtctgctccgatataaagtcctgtggaataattgttgtttcctgaaattacatcaaggttgacggattggctcccagtaactgaatactcattggcgggctcattgttattaaaggtggagttcgctccccatgcgggggattcagatgttgggacggccagggaaacactggtgtaacaagccagaacagccgccagcagggtaataggcagatggagacgcattataaaaatattagatgttaattttttatgtatataacggattgaaaattcgatgtcaagttgaaaataccagttcccggattctcatacttttactgtaagtgcattatgattttttaaatttctaaaatgggattttcaccttttcatttacctccccccttgaagcaagggaggtatactataagactttcattttgaatataaaatatcaaattttatattgcatgggccaatattggaatcatcgccgaattttcaatccgcttttcctcttttcgtgaaataacgcggagaagacataaaaaagaccgccccccggaaacggggagcggcccttgaagtgtgggtggagagaacaggttagcgttcgttgtcgaagttgatggtatcgttcaacatgtcttcggcaagttccgccgcttcctcttcttcgctggccgacgcgatttcttctgcgccctctgcgggttccacttcaatcttgctgtaacgggagaatccggtgccggcgggaatgaggtggcccatgatgacgttttccttgaagccttccagcgtatcggtcttgccgagggtggatgcttccgtcagaacgcgcgtggtatcctggaaggatgccgcggaaatgaaggattccgtttccagggaggccttcgtgatgccgagcagaacgggcttggctgcggccggttggcctccctgggctacggtttgttcattgatgcggtcgaacgtagtcttgtccacctggtctccccacaggaattcggtattgccgggttccgtgatgactaccttgcgaagcatctggcgcacgatgatttccacatgcttgtcgttgatttccacaccctggaggcggtacacttcctgaacttcgttgacgaggtgttcctggaggctttccttgccgcagacatccagaatttcttccggggagacggggccttccgtaagctggtcgcccagatgcacatggtcgtcttcatggacgatgacgtgcttgttcatcggcaccaggtggtccaccagttcgcccgtaggcgtttcaatggtgatgaccttcttgccgcgggaggtgttcttgctgctgaggcgcacaatgccttccacgcgtgcaatggtgcaggcgtccttgggcttgcgggcttcaaacagttccgccacgcggggcagaccgccagtgatgtccttcgtcttggccaccttgcggggcgtcttggccaccatcgtgccggcggagatggtttctccatccttcacggtgaggttggcgcctgcgggaatggcgtggtgggccaggacttcccgggtcttggcgtcacggatgaccacctgcgggtgaagttcctgcttgtgctccatcacgacgagggaggaggtgccggtttcacggtccgtttccttggaaacggtgatgccgacaatcatgtccttgaattcgaccacgccgcccttttcagcaatcacgggcacgttgtacgggtcccaggtggcgagggtttcatccttcttgatggtgccgccgttgggaacgtacaggatggtgccgatgacgggctggtaggattccagctcgcggccctgttcgttttcaatgcggacggagcagttcttgttcagcacgacgaagttgccgtctgcgttttccaccgtgcggaggtcttccgtgtagatgacgcggccatcgttcttggctttcacgatgggctgcttgaacgccgtggtagccgtgccgcccacgtggaacgtacgcatggtgagctgcgtgccgggttcaccgatggactgggcggcaatgatgccgaccgcttccccgatcttcacttcctggccggtggccaggttcaggccgtagcacttggcgcagcagcccttcttgagttcgcaggtgagcacggaacggattttcagctgttcaatgccgatcttttccagttgttccgcctgcttttcattgatgaggtcgttaatgtccacgatgatttcaccgctgacggggtcaacgatgcgttcgcaggaggtgcggccgtagatgcgggaggcgagggacgccacttcttcatcgccgtcatagatggcgtgaacggtgatgccgttgctggtgccgcagtcttccgcgtggacgatgacgtcctgggccacgtccaccagcttgcgggtcatgtagccggagtcagccgtcttcaaggcggtgtcagccagacccttgcgggcgccgtgggtggagatgaagtattccagcacggagaggccttcacggaagttggccgtgatgggacgttcgataatttcaccgctgggcttggccatcaaaccgcgcatgccggaaagctgcttgatctgcgccttgttgcctcgagcgccggagtccaccatcatgaagagcgggctggccatcttggaaccttcgttgtgttccagcttgcggtacagggccgcctggatcacgtccgtggtctgggtccagatgtccaccaccttctggtagcgttcaccgtccgtgatgatgccgtttttgtactggcgggtcaccttgtccagttccgcataggctttctcgatttccgtcttcttctgggagggaaccaccatgtccacgatgccgatggagcagccggaacgggtagcttccttgaagcccaggtttttcagggagtccagggtttgcacggtgcgttccttgcctacggtctggtagcagcgccagatgatgtcgcccatctgcttcttgcccacgttgcggttgatgtaaccgagttcccggggccagatttcattgaagcgaacgcgtccggcggtggtgacgataaccttcttggtcacgtccccgtacactacttcggaaggcttcttgccgtagtccgggttgtgcaggcggatccagtcatggtagccgatcttgcgggcggcaatggcgtattccacctcgtcaatggattcgaagagggggaggtgatgatggttgtcctggttattctgcacttccgcggcgcgggtgtgcgtcaggaagtacgcgcccagaatgatgtcctgcgtaggcgtggcaatcggcttgccggaggccggggagaagatgttgttgggcgccagcatgagctggcgggcttccatctgggcttccacggacaacggcacgtgcacggccatctggtcaccgtcgaagtccgcgttgtacgcgttacagacgagcgggtgcaggcggatggcggagccttcaatcaggaccggttcaaaggcctggatggagaggcggtgcagggtgggggcgcggttgagcatcaccgggtggcccttggtgacttcttccagaatgtcccacacttccggcgtcttgcggtcgatgagcttcttggcggagcgcacggtgtgcacgtagcccagctccttcaggcggtggatgatgaagggttcaaacaggatgagggccatcttcttgggaaggccgcactggttgagcttcagttccgggccaatcacgatgacggaacggccggagtagtccacgcgcttgccgagcaggttctggcggaaacggcctcccttgcccttcagcatgtcggagagggacttgagggggcggttgccggcgccggtgacggcgcggccatggcggccgttgtcgaacagggcgtccacggcttcctggagcatgcgcttttcattgcggatgatgacttccggagtcttgaggctcaggagggtcttcaaacggttgttgcggttgatgacgcggcggtacaggtcattcaggtcggacgtggcgaagcggccgccttccaggggaaccagcgggcgcaggtccggaggaatgacgggcagcacgttcaggatcatccattccgggcgcgtgttggactggaggaagccctgggccagcttcaggcgcttggcgatcttgcgcttgttctgcttggagttggtgttgtccagttgttcctggaggtccgtgacgagggtggccaggtcaatggaggccagcattttctggatggcttccgcgcccatgccggcttcaaagctgtcatagccgtattcgtcttccgcattgcggaattcctcttccgtcaggatggctcccttctccaggggagtgctgccggggtctaccacgatgtagtcttcatagtagatcacgcgttccagatggcgggccgtcatgtccagcatgaggccgatgcggctgggcatgcacttgtaaaaccagatgtgggagaccggaacggccagttcgatgtggcccatgcgttcgcggcgcacgcgcgcgttggttacttccacgccgcagcggtcgcaggtgatgcccttgtgcttgatgcgcttgtacttgccgcaggcgcattccatgtcgcgggtgggcccgaagatgcgttcgcagaacaggccgcctttttccggcttgaacgtgcggtagttgatggtttccgggttgacgacttcaccgaaggaccagctgcggatggtatccgggtccgccacggtgatggcaacctggtcaaaggtccggggcttgtcgctcagaccgtgcatttccctgatggtgggggtatcagacatatattaaaagttttgaagaatgtttgatgcccactcccgcgtcttgcggcacgggagtggaatacggtggatattagaatttgaggtcggagaagtcgacgtccgccaggccggccatgtcgtcgctgtcaaagccttccgtcatgccgtccacgggagtgaggtccgtatcgccgagctgcagggagggttgttcatccttgctgccggggcgcacgttcaggcccagggactgcatttccttcatcagaacgttgaaggattccggagttccggcttccagcgtattgtcacccttcacgatggattcgtaaatgcgggtgcggccctgcacgtcgtcggacttgacggtgagaagctcctggagggtgtaggcggcgccataggcttccagcgcccacacttccatttccccgaaacgctggccgccgtactgggccttgccgcccaggggctgctgcgtgaccaggctgtacggacccacggcgcgggcgtggatcttgtccgccaccaggtggttcagcttgagcatgtaggtctggcctaccaccaccgggttgtggaagggttcgccggtcaggccgtcatagagggtgctcttgccgcccacggtgccgtccttgccgtcaccgatccaggtgaatccgtccaccttcttggcttcggacatgtagttccagatggtttcttcactgatgccgtcgaacaccggggtagccaccttgaagccgagggccctggcagcaatgccaaggtgggcttcaagcacctggcccacgttcattcgggaaggcacgcccaacgggttcagcacgatgtccaccggagtgccgtccgcgaggaagggcatgtcctgttccgggacgatcttggcgacgacgcccttgttgccgtggcggccggccatcttgtcgcccacgccgagcttgcgcttggcggcgatgtacaccttgacttccttcagtccgccgggttcggattcgtccccggattccatctggtccagcctgtgttcgcgttcgtcgtccagctccgtgaagcggccttcgaaggaggtgatgatttccaggatcttgttgcggatcgggctgggttcgatttcgatgtggtcgtgcaccagggccagcttgcgcagcagggtcttggtgatcttgcggttggccgggatgatgatttcaccggtctgctcgttgaccacgtccagcgggatcttttcacccagaagaatgtcggagagcttcttggtcagctggtcaatgagctgttccttcttcttcttgtgctcgtcattgatcttcttgaactgctttttcttttccgcgctgtccacgacgaggtcgccgcggtggtggccggagcccgtggaagagatgcgaacgtccatcacgatgccggtgcagccggaggggacgcggagggaggtgtctttcacttccgcagccttttcaccgaagatggcgcgcagcaggcgttcttccggagccagttccgtttcagacttgggagtgattttaccgacgaggatgtcgccgggcttcacttccgcgccgatgcggatgacgccgtcatggtccaggtttttcagggcttcatcaccggcgttcggaatgtcgcgggtgatttcttccgggcccagcttggtgtcgcgggcctgcacttcaaactcggagatatggatggaggtgaaggtgtcttccttcacggttttttcggagatgacgatggcgtcttcgaagttgtaaccgttccacggcatatatgccaccagcacgttgcggccgagggccagttcgccctggtccgtgttcgggccgtccgccagcacgtcgccggtcttgatcttgtcgccgcggcgcacgatcggacgctggttgatgcaggttccggcattggaacgcatgaacttgcgcaggggatagacgtatacgccgttgtcgcggtccgtgcgcacgctgtccggatcggacaggaagacttccggacgcacgggcaattccccgtccttcgtggtgataatgacttcagccgtggcggaagccacgatgccgtccgcttccgccagaacgacggaacgggagtccctggcgcacttgccttcaatgccggttcccacgtacggggattccgccaccatgagaggcacgccctggcgctgcatgttggagcccatcagggcgcggttggcgtcatcgtgttccaggaagggaatgaggcctgcggcgatggagacgagctgcttgggagacacgtccatgtagtgcacgtccgccgggtccacttcaatgaactcgcccttttcgcgggcggtcacgcgggaggtggtgaagttgccctgttcgtccagcgggttgttggcctgggcgatgaggtagccttcctcctggtcggcggtgacgtattcgatggtgttggtgacccggccgttttccaccttgcggtagggcgtttcaatgaatccgaattcattgatgcgggcgtaggtgcacatggagttgatcagaccgatgttggggccttccggcgtttcaatcgggcagatacggccgtagtgggagggatgcacgtctcgcacttcgaatccggcgcggtcgcggttcaggccgccgggccccagggcggagaggcggcgcttgtgcgtcagttccgcaagggggttgatctggtccatgaactgggagagctgggaacgtccgaagaagtcgcgcacgacggcgctgagggccttcgggttgatgagcttgctgggcgtcacgccttcaatgttctggtcaatgagggtcatgcgttccttcaccaggcgttccgtgcgggcgaggcccacgcggcactggttggccatgagttcgcccacggcgcgcacgcggcggctgcccaggtggtcgatgtcgtccaccatgccttcgcccttcttgaggcgcaggaggtacttgagggcggccaggaagtcttctgccgtcatcaggcgctggtccaggctggtgtccagaccgagcttctggttgatcttgtagcggcccacgcgggtgaggtcgtatttcttgggatcgtcaaagagcctcttgagcagggtgcgggcctgggcggccgtggcgggatcgccgggacggaggcgcttgtagatttccttgagggcggattcctcgtcatgggcgggatccttcttcagggtcttgatcagcacgtcgtcctcgctctggtcgatgacgtcgatttccttgatgccgaactggaggagctggcgaaccacgcccatgttgagctgttcgaaagccttggcaagaacgaggtccttgtccttgatcgtgtccacggccacgaggttgtgcaggtcttcctccgtcatgtcttcgctcaggggaagcgtgcggatgtcgtagaactggctgacgatatcgcggtccgtcttgaagcccagataacgcatgaacgtcgtcgcaaggaacttgcggcggcggcggcggcggtcaaggtagacgtagagcaggtcgttggtgtcaaactggacttccagccaggagccgcggtccggaatgatgcggaaggagtggagcagtttgccgttcaggtgctgggcgctttcaaagcagatgcccggagaacggtggagctgggacacgatgacgcgttcggcgccgttgattacaaaggtgccgcggttggtcatcatggggagttcacccatgtagaccgtttcttccttggattcgttgtcggacttgagcttgaaggtgacctggagggcggcgctgtaggtttccccggcgcggatagcctcgtaatcgctcatcttcggctgttcgatgtcgtaggagacgaagtcgagctcaatgttttcgtcatagctcttgataggaaagatttccttcagaacgccgtgtaacccgatgtttttcctggccgcggccggggtgtcctgttgtagaaaatcgaagtatgattgaagttgaatctcaataaggttcggaggttcgatgacttccttgatattcccgaagtagagtcgctttgacatgggctgctgtggcggagatgttatgggtttgcatcctgaaaacccggatgctgggttgattggttccttccttgggagacggaaccgactggaagcgttttgacgggtaaaaagcctctagtcggtcacgcgggatgtgaagacgaggaagcgcaacaggagaaaaacgggtcttctcctgttgcgcgggaagtaaaaagcttacttgacgtccaccttggcgccagcttcttccagcttggctttggcggcgttagcttcgtccttggagacggcttccaggatgacggcgggggtgccttcaaccagtttcttggcgtccaccaggccgagaccggtcttcacttcgcggacggccttaatcacggcgatcttgttggcgccggcttccgtcaggacgacgttgaattcggtcttttcttcttcagcttcggcaggagcggcagcggcagcggcggctacgggagcagcggcggaaacgccccacttttcttccagaagcttgacgaggtcggcagcttccaggatggtgagggtaccgagttcttcagcgattttgttaatatcagccattgtattgttttctagtttggtttcgagtcgcgccaagagccaacttggcatttcagttctccggctggagttccgacaaggaacctgtaggagagtcgggcccggttttcacacatttggctagagtgcaaccgggccgtccggtcaaggggttagtattaggcggcgggttcttcgctgccgccgttttctttgtccacatatgcctgaagaactcgggcaagagcggagccggccgcgttgatggtgccaaggagcttggcaagcagctggtcgcggggaggcagttcaccgatggcgcggatgtcgtccgcggagaggatggctccgtccaggatcgccaccttgtattcggccttcttggaggccttcgcaaaggtattgatggccttggcggcggcggccacgtcggacgcgccggtcacgaaggcggtctggccgacgaggtgttccccgatgtcgggaaggcctgcatccgtcagggccgtacgcatgaagttgttcttggctacgtggcactgggcgccgcaggcggccagggcggaacgcaggttggtgaactcaggcacggtgatcgaggtgtagtccacgacgatcaggaacggggaggcgttgacgcgggcggtcaggtcgtcaatgatgatacgcttgtcaggattcatggtgtgctaaatcggttcgggttacagtttggcgatggaagcggtgtcaaccggcagaccggggcacatggcgcatgaaacggtgacggattcgatgtaggcgcccttggcggaagccgggcgggccttgacgacggaatcaatcagagcaacgatgttttcagtgatgccttcgttggagaaggacagcttgcctacagcggcggagatgttggcgttcttgtcaaccttgtagtcaacgcggccggccttcacttccttcacggccttggccgtatcatccgtaacggtgccggttttcgggttgggcatcaggccgcgcggacccagcacacgggcaaccttgcgaacctccgtcatggcgtcgggggtggcaatggccgtgtcaaagtcgacgaatccttcctggaccttcttgatgaggtcttcaaaacccacgaattcggctccggcttcctgggcggccttggcggcatcaccctgggcgaagacgaggacgcggacgttcttacccgtgccgttgggcagggagacgctgccgcggaccatctggtcggatttgcgggggtccacggtcaggtggaaggaaacggtgacagtcgggtcaaatttcggggccgggaaagatttcatggtttccacggcttccgtgatgctgtagttcttgttaggggtaacaagcttggctgcttcttgatatcgcttgctgcgtttggtagacatgtgtgtatttggcagtgcgttcggattggttaatcctcctgcggtgagtgttacataccttcaacttcaatgcccatctggcgggcctggccggcaaggatgcgggcggcgcgttcggggtctttcgtgttgaggtccgggagtttggtgttgacgacttccatcagcttggccttggaaagagtggcgaccttctttttgttcggttcgccggagccggaggcgatgccggcggccttcttgagaagcaggctgcccgggggctgcttggtgatgaaagagaatgatttgtccttgtaaacggtgatgacggtcggcaggaggtcgccggcctgcttttgcgtggcggcgttgaactccttgcagaatgccatgatgtttacaccggcctgaccaagtgccggacccacgggcggggaggggttagcggctccggcattgatctggagcttgatgattttggttatttcttttgccatggttttgctttgttagcggagaaaatgaacgggagaagcttgctgcctgccggcgaatggggctcaggctttttccacctgccagtattccaggtccaccggagtggcgcggccaaagatggagacgctgacgcgcagtttgcctttttcggggtcgatttcttcgatggtgccttcctggctctggaacgggccttcgcagacgcgcacgggatcgccgacggcgaattccaccttgggacgggcggcgacggcttccgcatccagcaggggcagaagatcctccacctcgcgcttgcgcatgggcaggggagcgttgcgggaaccggcgatgctgatgacgccgtcaatctgctggatgaagtaccagaggtccttgttcagggtgccgtccgcttccagcaggtacatgttggcatagacgtacccgggaaaaagcttgctgtggcgttccgtctttttgccgttgcgcacttcggagatgagttccgtggggacttccacccggtagatgaagtcggaaagttcggcgtccttcgccttgcggataatgcggtcacgaacgctgttttcctgtccggagaggacgtgaagaacataccattgttcgtgaggctctggggtactgggcatgatcggagaaagaaagtgggagtaaaactagattgccaactggatgaggtagttgaccacgctgtgaaggaagatgtcgaacgatgcaacaaacgcgccaaggaagaccatggcaatcagtacgacgagagtggaaccccagagttcgcggaattttttaaaacctttcaccttgggatcgctttcccagggccaggtggtcttcttaagttcgcccttaacttcggcgatgaattgagaaatcttgcgaaacatgcttcaaggtggggtgatgtatttggaaagaagtggcaggtcaggagggactcgaacccccaacttttggttttggagaccaacgctctaccaattgaactactgacctgttggtgtctcttctttcgtgggaaatgagggggcctgcggggaggccccctcattaaacctatgtagattcctctacaagttccaggggaacttagtcaaggatttcgctgatacgaccggcacccacggtgcggccgccttcgcggatagcgaatcgcatggctttttccatggcgatcggagtgatgagctggacttccaggttgacgttgtcgccgggcatcaccatttccacgccttcgggaagggtgcagcagccggtcacgtccgtcgtgcggaagtagaactgcgggcggtagttgttgaagaacggggtgtgacggccgccttcttccttggtcaggacgtaaacttcagccttgaagtttttgtggggcttcacggtgccgggcttgatgatcacctggccgcgttcgatgtcttccttcttcaggccgcggaggagcaggccaacgttgtcaccggcctggccttcgtcaagcagcttgcggaacatttcgatgtccgtaacggcggtcttctgggtgtccttgatgccgatgatttcgacttcttccatcttcttgacgatgccgcgttcgatacggccggtagccacggtgccgcggccggagatggagaacacgtcttccacgggcatgaggaagggctggtccacggggcgttcgggctgcgggatgtaggagtcaacggcagccatgagttccatgatggagtcttcagcggcggcgtcgccttccagagccttaacggcggaacccttgatgatgggggtgtcgtcgcccgggaattcgtattcgttgagaagttcgcggatttccatttccacgagttcgatcaggtcggggtcgtcaaccaggtcgcacttgttcatgtaaacgacgatggcggggacgcccacctggcgggcaaggaggatgtgttcgcgggtctgcggcatcgggccgtcggaagcggcaaccacgaggatggcgccgtccatctgggcagcgccggtgatcatgttcttcacatagtcggcgtgtccggggcagtcaacgtgggcatagtgacggttttccgtttcgtattcaacgtgggccgtggagatggtaatgccgcgttcgcgttcttcgggagcggcgtcgatctggtcatagccgcgtgcttcggcgaaacccttcttagcgagcactgaagtaatggcggcggtaagggaggttttgccgtggtcaacgtgaccgatggtgcccacgttcacgtggggcttgttgcgctggaattgctctttagccataatgttttgtttaggtttgggctgctatgggtctagcttgaagatggagcttctggcgggaattgaacccgcgacctcatccttaccaaggatgcgctctacccctgagctacagaagcatagacttcttccgcctttcgctgctcttagagagttgtaaatccgcccaaacctgcggttctagcggataaatagcatcctcccgtgttgcctgacgaaaagcggacgctatgttacgtttttaaatacgggatgtcaatgaaaacatgaacatttttttatcattatgccgaaaatacggggtgttcatgtgtaatatctttatcaggaatgcgttgaatatttggatctgttcagatcctccgttaatttgagattggggtcaacgtcttcatccagagagtggaacagccccctgcgggctttcaggcaggtgacataggcgatcatggcggcattgtccgtcgtcaggtcaaagtccggcaggaccagttccacgttttcacggtcgcaggcggctttcaggcgggagcgcagttccccgttgcaggagacgccgccggaaacggaaagggtgcggtggccggaaacgcgcagggcatgcagcgccttgtgaatcagtacgtccgtcacggcacgctggaaggaggcgcagagatcgcgcagggtctgttccggcaggtcgtgagggtcgccgcttgccgtcagcctggggagggtgtagagaacggccgttttcaggccggagaaggagacattggccgtgtgctccttcatcagggcgcgggggaaggagaaggcctgcgggtcgccgtgcgccgccatgcggtcgatttccgggccgccggggtaggggaggccgagcatttttcccaccttgtcaaaggcttcccctgcggcgtcgtccagggaacggcccaggaggcggtagtcccccacgccgcgcacatccacaaagagggtatggccgccggagacgaccatgcccagatggggaacggggcctccgggacgtttaaggaagggggagagcaaatggccttccagatggttgacggagacgaagggctttcccgtcgccagcgccagcgccttggccgtgctgttgcctaccagcagggcggctaccaggccggggccgcccgtggcgccgaagacatcgatgtccgccggggtcacgccggcttcacggcacgcggcccggatgactccgggaaggtccgccgagtggttgcgggaggccagctccggcaccacgccgccgtgccggcggtggatggcgatctgggaggagatgatggaggagagtatttccggcgcttttccctccccggcggaacgcaggatggcgaccgccgtttcatcacaggaggattctattcccagaacggtgagggattccggcatggcggagaagcgggggagttaggaggcctggcggatttgcgccggttttttgtcggtaaccgtttccctggtgatggtgacggagtccgcgtcttccatgctgggcaccttgtacatgacgtccagcatgagggtttcaaagatggaacgcagggcgcgggctcccgtgccgcgttccatggcttccgcggccatggctttcagggcgtccggctgcacatccagcctggcgccgtacatggcgagcagtttggagtattgcttgaccagggcatttttaggttccgtgagcaggcggacgagctggccttcatccagcttggagagcgggcagaagatgggcaggcgtcctacgagctccggaatcatgccgaaggagaagaggtcttccggcatcgcctgggccaggacttcctcttccgagtattccttgcggtcgcgctgttccgtgatggctccgaaccccatctgggtggcgccgaggcgtttgcggatgatgtcttccagtccgacgaaggccccgcccacgatgaagaggattttttccgtgttgacgcggatgtattcctgctgcgggtgtttgcggcccccggtgggcggaacgttgcagatggtgccttcaatgattttcagcagggcctgctgcacgccttccccggagacgtcccgcgtgacggagacgttctgggtcttgcggccgatcttgtcgatttcatccacatagatgatgccctgttccgccttggctacgtcaaagttcgcggcctggagaaggcgcaggatgatgttttccacgtcttcccccacgtagccggcttccgtcagcgtggtggcgtccacaatgcagaaggggacgttgagcattttcgccagcgttttcgccagcagggtttttccggagccggtagggccggccagcaggatgttggatttttcaatttccacgtcgtccagggattcgtcctccagcatcacggcgctctggcgcaggcgcatgtagtggttgtacacggctacggagagcacttttttggcgtaatcctggccaatgacgtactggttgagcgtggcgcacatttcttccggcgtgggcagcggtccttcgtaggaggccggggctcccggcgtttccttgagcatatccgcggcagcggccttgcgggcctccgcctggcacatggcataggcggagggctccatgctcagaatgccgcggatgaagcgggtcgccagcggaaggccggtatccttcacaatcatgttgacgcaaatttcaacgcaattgttgcagatatagaagtcttccgctatctggatgagcttgtccaccttgttcccgggcttgccgcagcaggaacaggcaggaatatgagggttggaaccggacatggtttttcagggagagagaaatgggggaggcaggggtcaggccttggcctttttcttgtcgtcccgtccgtcggaatgatgcgtcagcaccttgtccaccaggccgtaggccgcggcttcctcagcggtcatgtagttgtcgcggtcggcgtccttttcaatctgcttttccgttttgccggtgtgcttggccagaatgccgttgaggcgcttcttgaggttgaacatgaagccgatggtgcgttccacgtcggaggcggtgccctgggcgccgccggaaacctggtggatcatcacatgggagttcggcaggcagaagcgcttgccgggcgtgcccgccgccagaaggacggaccccatggaggcggcgatgcccaggcagtacgtgttcacgtcacaggagacgaactgcatcgtgtcgtaaatcgccaggcccgcggtgacggagccgccgggggagttgatgtacacgtggatgtcttttttcgggtcggccatctggaggaacagaagctgggcaatcacggagttcgccacatcgtcgtcaatggcggaaccgatgaagatgacgcggtccttcaggaggcgggagtaaatgtcaaaggctcgttcgccgcggccgtcctgctccaccaccatggggacgtagtaggcgttcatggggcctgatttggaagattggtcttgaaacatgtttgttgaagatgggatgttgttttatttaatgtatgctacccgtctgcaggatgcaaaacgggggagtcgggcatgtgcgcgccaactccccctggtaaggtgtcttgtgcagaggagggttattgctcgtctaccgttactttggcctcttttgtcaggaagtccagaaccttggctgtcagcaggctcattctgatgccatgcacgcggccttcgcgctgaagttcgcggatgtaggacttgaggttctttttctgctggcgggcctggcgggccacttcattgtagagttccatttccgtgacggcgattttttccacctgggccacttcctggagcatgaagaagaccttgagattgcgcttggcttcctttctggcttcttcgcgggcttcctccacaaacttgtccatgtccgccggggcgttcccgctgtacatggcctgctgcatcttctgctggaggataccgtacacttcgcgttccacgacggcttccggcaggttgaagtcaagcatgtccgccagcttttccgtgatctggtcggccttggcttcgtcaatctgcatggtcttgcgctgggccaggttttccttcagggcggttttcagttcttccaggttcttgccgggaagcaccttttccgcaaaggcgtcatccatggccgggagctgcttttcacgcacttccttcacggtggtgtggaacacgagttccttgccgcgcagttccgccatcgggaaggtatccggaatggtgacggtgatatccttgctgtcgccggccttcaagccttccaaggcggaggcgaagccgggcaggaactggtcttcctccactttcatccactggccgtcgcggccttccaggaagcctacgggcttgcccgcggcttccgctacgggcttgccgtccagggtggtcttgaaatcaatgatcgccacgtcatccttcttcgcggcgcggtccacgggggtaaattccgcaatctgttcggccagggagttcagggcttcctccacgtccgcttccgtcacttcggaggaggggaccttgacttcgatgcccttgtattccggcagttcgaattcgggaaccacggtcatcgcgctggtggcggtgtaatttccctggtcgtcgagggattgttccggcttgccgaagttgagcactttcaatttgggattttcttccagagcggcggagcaggccgtttcaaaaagagtgtccagcagttcttcttcaatttccttcttgaaacgtttttcaatgatggacttgggcgttttgccggggcggaagccgggcagcttggctttgccggcgtaggaatccacaatagaggcgcggcgcgcggccgtggtttctgcggggatggaagctttcagcgtggctgtgcagtccggttgaatatcaacgttgatttccataaataatacggtcagtgttaattgaaagtggttctgtctcggctccggtatggcggcagcggtcaaaacacgagcggcaataaatgtaatgagcgggtatctggagtgcaagctattgcacgggaatgacacaattgcctttctcaggcgcacatgcgcgcgcaacgtaagaaatgcagggcaactgcgttctacgcggaatcacgtcttgactatgcggacggaaaagtcctttatatcccaagcattaagttcagctctcatgattcgtcccgtttttttgtgtgtttcctttcccctgatagcatgttcggctgctttggcccaggataagacttcccttaacagaggcggctacggttccgtaatgaccccggaacaggtggtgcgggaactcggtccggaaacggggcttctgcccggtgaccaggcgtatgagggccgtcccgtgaaaagcgtctccgtgcgttatagaagcaccggcaagaccgtgtccgaagaccgcctgaaaaacctgctggctacccagccgggcaccaattattccccggaagtggtgaacaaggacttggaacggctgctggaaagcggcctggtaggcggcaatacgacggtggctgtggaaccttccggcgacggcgtgaccgtggtgtttgaaatggcggcccagaacctgctgggcggcgtgggcttccgcggcaacaccgcgttcgacaaccgggacctttccgaggaatgcggcttgaagggaggggaagccctcagcgacaaggccctcagcagcgccatctccaagctgcgcacctattatcaggaagcccggtatccggatgtgcgcgtttcctatttttaccagaagacggagcgccccggctttgtggacgtggtctttgacatcaatgaaggcaggaaggccaatatcatcaacatcgattttgtaggcaacgaccacatcagcgccaaggacctccgccaggtgatgaagaccaaggagaagggctggctgacctggattaccaagtccggccgcattgaccgcgagcaattggaggacgatctggcggaactggtgacttattaccgcaacaagggctacctgcgcgtcaagctggacaaggtggaatattttgacgccggcaagggcaacgagcagaagctgacgatgaggatcacgcttaccgaagggcggcgctacaaggtcaatcaggtcgccttcggccccaccaaggtgtttacggcccaggagctgattcccggcttgagcatgtacaacggggatacctattccgcccagaaggtggccgacgacgtgacgatgattcgccgttattacggctcccgcgggtatgcggacgccgccgtgcgcccggacatccaggaagtgggcattgatcccaggaccggctacgggcagatcaacatcgtttaccatgtgacggaaggcagcccctaccgcgtaggcaacatccgcctgaccgggaacaaccgcaccaaggattacgtcatccgccaggaactacccctccagtccaacgaccccatgaactccgtggacctggataccgcccagaagcgtctccagaacctgaactattttgacatggtggacgtggcccaggtgggttccacgcggcccggctaccgtgacatcaacattgaagtggcggaaaaacgcaccggttccctgaacattggcgtggcgttctcctccattgaaagcgtgtacctgttcgcgggcatcacccagtccaacttcgacatgtatgactggtcctccttcgtgggcggcggccagcgcttcgccatcaatacccgcgtgggttttgaaacgcaggatgccagcatctcctgggtggacccgtggttcctgcaccgcaagctggccttcggcacggaaatcttctacagcaattccacgtacttctccgactattacgaccagcagaactacggctttgccgtttccctgcgcaaaccgatcggggaactggattacgtgaagctggaataccgcctggaacagtaccagattgacgccaagggtaacgcccccatcttcttctggctgcaggacggcgattacctgcgcagccacgtggaactttcctacaccattgatacccgtgacgcgcaaatcttcccccgcaagggcggcaagtttgaagtgctggccggttattccggcctgggcggcgatgtgaagacttacaacttcggcatcaacggctcttattactggaacttgcgcggagacaccattttcagcatcaatgccggtgcggccaccgtggattcctacggcgaccatgacgtacccatttttgaacgcctctacctcggcggcccgtacaacatgcgcggcttccgcttccgggacgtggctccgtacaatccggctttgagcggtgatgaaacgatgggcggccgttcctccttcttctgccagtttgaatattccattccggtgattgaagaagtgcgcgtcgccgtgttctacgacatcggcttcgtcaacggggacgcctttgacttcagcgcatccaagatcgtttccgactacgggatcggcctgcgcctgaacctgcccatcggtcctctggcggtggactatgccattccgattcagaagaacaacgccattgaccgcggaggacaattccagttctatctcaactattcctactaattttattcaataatccctctaccatttgacgacatgagcaatttccgcatccttattctggtgttcctggtggtggtgctggccgttctgggaatgatctatgtgaacatttcctcaaggatggatgtgattcaacagcagcagatagcccccgtgcccgctccggcagccgtcaatccctctccttatcttcccatgcccacgcagacgcccggcaccgccgttcagccggtagtcgtggcggacccggtggtgagcgaggagctggcccatgccacggccgagctggaacggatgaagaaggagaatgaagatttgaagaagcgccacgccatggcggaggaggaacgcgccctgctggaacgccggagcattgaaaagggagacccccgcctgcaatggctcaatgagatcaaggacgccgaacaggtgggacgcgtgacggaatactaccgtgacgccaaccttgtcctgttccagtccatcggccagcctgacctgaaagtggggcaggaactgggcatccgcaggcgcggaagcatctttgtctccctgattatcgacggagttgacccggacgggaaggtgttccagtcctacgtgaagcgcaacacgctttttgacaacaatgacaaggagcccatcaagccgggggatgaagtgattgtcccgcccgcaagctggcaggaaaacatgatgggagaaggcgagcccggcgcggccccgtctgccgctcccgctcctgcggcggctccccagccggtgatgattcccatggagccgtaatgcgggtccggatagagccaagccaaataaagaaaaagtgcatctgagagaaagattgcagtcgggcgcgggccccagtctgtcctttgaatttttcccgcccaagaacgagcaggctgcggcggccctgtaccagaccattcgtgaactggaaccgtaccatcccagttttgtcagcgtgacatacggcgcgggcggctccacccgtgagcttacccgggaggtggtgctgcgcatccagcatgaatcccgcattcccacggtgccccaccttacttgcgtaggccatagccgggaggaagtatggagcattctggaccagtacgcccaggcaggggtgcgggccgttctggccctgcggggagatcccccgcgcggcacggaaaattacaaccgtgatgcggatgccttccgccatgcggcggaactggtggcttttattcgtgaatataacgaatccggacgccatcctgatccggacgggttcgccataggtgtggccggcttccctgaaggccatccgtccacgcccaaccgcctgcgcgagatggattttctgaaagcgaaggtggatgccggcgcagactacatctgcacccagttgttttttgacaaccattcttttctggattaccgggaacgctgcctgctggccggcatcaaggtgcccattctggccggaatcatgcccgtaaccagcctgtccggcatgaaccgcatggcggagctttccgggggcacgtgttttccggcccggctgctcaaggcgctgaaacgcgccggctccaatccggacgccgttcaggaggtaggcatccagtacgcctccagccaatgtgcggagctgctggattccggcgtggccggcattcatttttatacgctcaaccagagccgcgccacgcggcagatctacaggaacctgggcctgaaggattccctccagcttctggaacatggcgaagataagtaaaaagctgattgatttggccgggacaacacgatagaaacctcttcaacatattatggatatcaaggatattaaacgggccatggacaacatgccgatgggcgacggaagcgcgtttgcggaaatctccgtcggtccggccaagcatgaacagtttttggatgaacactacggaaaggttgcgctggtcgtgctgctgtgcgttctcggagccgccggatggatcatttacaacggcatgcaggattccatggaaagaaaggcaggcgccgcgctggtggccgccatgccggaatcccccgctaccggggaaatctccctgaatgaacaggggcttcagcaggtggtggcggattttgacgattcccgcgccgccgtcaccgccacctatcttcaggcggtcgccctgtggaacgccggcaaggaggatgaaggcgtagccaggatgaaagcttttattgattccgctcccacggaggaatggaaggcccaggcttccgttaccctggcatgccgcctgatgaaccgcgggaaggcggatgaggcggatggcctgttccgttccgtggtggacgcgggggatcccactttttccggttttgccaccatgtgcctgggggacattgcccgggcgaagaaggacaatgccgccgcgggagccttttaccgtgaattggcggaaaagttcccgtccagcgcgtttgtcctccagcgcggaggctacctgctgcgcaagagcctgtttgatattcagagccccgtccgcatcgaacccgctgcggagcagaaataatccgggcggacttttccggagctttccggaagatgaacgctttctacatccgcatgtctgttcttttgcagcgcatgcggattttcgtgttcaggcgcgccggaacagggcgttccaaagggtccgctgtgcataacaggcgtcatgattccgggaattcctctccgggctgtgacatgcttaaacaaatcatgcgggcacgccgcgcttactggatgcaagccgggttgccggcattaccaatatttcacaccatgaacaagcatatcaaatccctctggctccttcccgtggccgggctgtctctttccctgatgccgtcctgcacgacggacagttacggaaacagcaccgtgacgcctggcggggccgccgccatcggcgtgggtgcgctggccgccggggctgccatcggcgcggcggtccagcatgaccgcgacaaggacaggtatcgcaatgactggcatcatcacaatcctccgcctccgccgccccgtccgccccaccgcccccattggaggcggtaagggaaagcccatggcccgcaaatcctgcggcgctccagctttgcaggaagagcgcggcgcaacgtggtatttccggagtccggtagggttctcaggactggcggatgccgcggagcgcccaggtcatgcgctgcctggcgctttccgggtcattgaggatggagcccagcagatccagcacgggccgcacggcattcgggtcgtgcacctggagttgtccggaaaggataaaaggagccccgccgcagcagacgaggtagatgaggatgttcatggggtctccctggagcacggaaccttcctcctgggcttcccgtatggtttccagcaggacgagggggtggcgcgtatggattcctgaaatgaagcggatggccgcccgttctcccgccagggcgtccagcaccagctgggcaatgaactggccgtggcgcagcaggaactccatgacgtcttccaggatggcttccagtttttcaaaggccggaagatgaatattggcgtgggttctgacgccggtgaacaacggttcgtaccagcgttccagcagttcgttcagaaaagcttcccggttgccgaagtgatagacaaagctccccgtattggtgccggcgcgcagggacaggccgcggatggtgagagcgcggagcccggattccccgacgatcatggctcccgtattgagcaggtgctctctggtggatttccgtttgggcatgacggtgaagcttaagcacccatgtgtgctccttatcggcccggaaggcaaggacttgttacgtctgtcattgtaaaaggcggaaccggggcctcgtccttccccggttccgccgctggaatcccgaatggatcaggaggttgcttccaattctttccggcgggaggaaatccagcgggagaagagtttggctgtggccggaatgatgagcaggttcaggatggtggctgaaaccagtccgccgaactgaacgatggccagcggcccgagcagttcgcccccgggcttgtcaatggcccagatcagggggagcaggccgagcaccgttgtaagggaggtcatgatgatgggaaccacgcgttccagcgaaccttcccggatggcttccgccgggttcatgcccttgtgttccagcgcccggtacctgttgagcaggatcaggccgctgcggatggcgaagccgatgacggtaacgaaccccacgatggaagccacggagaggatgggcggaatgtacgcggcgccgaacagggaggacagcgtgccgggggaggccaggaagacggctacaatgccgcccaccaggcacagcggaatattcaccagcgtcagcatggcgcggcggacgctccccagcgcggaggaaagcagcagcacaatgagcaccatcacgatggctcccagcacgtaaagccgctgggaagcggattcccgcgccttgatggtgccgtcatagtccactgtgcagcccatggcgttcatcaccgggtccaattgttcccggcaggcttttgccaggtcccccaggttggaattgggggaggggttgcaggagatcatggccttccgcatggtgttgtccctcaggatgaggttggagacctcctcccggtacacctgcgccacgtcggccaggcgcacggtctttttattgggggaaatgagttccaggttcttgatgtcttcaatggacgtcttcagcctgggatcaatgcgcaggacaatgttccagtggtcctggttcttgatcacttcccccagcttctggccgttcatggccgtggaaacctgttccgcggcgttcgccatggtcaggccgtgggaggccagggcttcctggttgtactgcacgcggatggtatccaccatgatttcccggttggcgcgcgcgtccgccacctccggcatctttgccagaatctccttggccttctgggccgccaggcggagctggggcagctccgtgccgtaaatattgatggcgatttccgagttggagccggagagggcggaactgatgcggtgcgccagcggatagccgatcatggagctggtgccgggaatatcgtcaatgcacttcttgatggcggcgcgcagttccttctggtccttctccaggtctacgcgcacgagcagttcggaggcgctgacgggttccgcgtgttcgtcgttttccgcgcgtcccgtgcgctgggtgacgctgagaacgcccggaatgcgttcaatgtccttcatcaccgttcgggagatgcgctccgtttcatccagggaagtgcccggcaccgtgctgacgaagaccgtgtagcagtcctcgttgaacggcggcaggaagctggttccgaaggtggaccccagccacagggccagcagcgtgatggccgccatgatggcgcagaccgtcttggagaagcgcaggcagaattcaagaatgggcgcataaatgcgcttgatgaggcgggagctgaaggagtccccgctttccagcgtggcggcgtttttgctcttcttgaaccacatgtagcagagcaccggggtaatggtgacggctacgatgagggaggagagcagggccagcatgtaggagatgcccagggggcggaagaactggccttccagcccggacaggaagaggaccggcgtgaacaccagcaggatgatgacggaggagaaggagatggaacccacgatttcccccttggcctccatcagcacctcatacttgctcttgcgcctgtcctccggcagggcggcgttccggttcaggtgccgccacgctatttccacgaaaatgatggcgttgtccaccacgtcccccacggctacggccaggccgcccagggtcatgatgttgatggccagcccgaaaatggggaacatcatcatcccgaacaggacggacaggggcatggaaatcagcgtgatgatggccgtgcgcaggttcagcagcgtcaggaagatgacgatcatgaccaccgctcccgcaatgagcagggtctccgtgccgttgtccagggacatttcaatgaaatccgcctggcggtaggcggtggtgtgcagtttcatgcccttgggaagctgactctggctgaactccttgacggctgcgtccacagcctgcgtcagggccagcgtattggctcccggcaccttctgcacggaaagcaccacggcgtcttcccccatgaacccggcgtcaccccgtcgcggcgcgccgtctatcttgacctccgctacgtcctgaagccggagaatgccggaggcgtggtccggaaccagggcgcggttcagctgttcaatattggcggtgcgggtatcctgctgaatggggagctcctgcccggccacgtcctccaggtacccggcgggcacggaagactgggattcctcaatggccgttttcaggctggaaaggtccacccctgccagcttgagcttgttgggatcgtaaaccacctggtattccggcaggcggccgcccagcaccgtgacctgtcccacgccggggatggccagcaggcgcgtgcgcagcttgtattccgccaattgccgcatgtccagcgtggaggtgtccttgtcccccgtcagggcgatcagcatgatttcccccgttacggagacgatgggcgccagctccggggacgtgccttccggcaaggactcccggaccgcgcccaggcgttccgttacgatctggcgcgcctggtagatatccttgtcccagtcaaagtccacccatacgaaggagaggccgctgccggaggaggagcgcacgcccttgaccccggcggtgccgttcatggcggactcaatgggaatggtgatatactgctccacttcctcagcggtgaggccgggggcttccgtctggatggtgacgcgcggaaccttcagttccggaaacacgtccacgggaatatttttcaccacgaaaatgctgatgaccgccagcgcgagcgtcagcagaatcacggtaatcctgttattcaggcagaatgaaattagaaagttcatcgaattcctgtttctattaaccgttctctaatcacgttgagctgaaaatcaatgttccccttcgtggaactggccgtccgcatggaaatgcccggccgccttcttgctcccggcgtctcccgtgggcaggatgtatttcaattcatagccgcctttggtcacgatggtttgtcccggcgtcaaccccttgacgggcgtttttccctgccgtgcgggcagtgtttccaccttcttcatgacgaaggtatcgtccgccgccttgatgaagaccacgtcgttcacccccaccttgacgacggcgctgttgggaacgggaataaatccgtccgtggcggcgtcatgggaatacaggtccagccgggcaagctgtccggcatgcgtcccttccggcatgcggtccggaacgaagtacagggcacgggactgcgtggcggggtccacctggtccgccacccgcagggctccgtccagcacttccgtattttttccgctggtcagggccagctgggccttcgcataatggacggggtcagccccgtaaatggtggtggcgaattccagttcccccttgttggtcatgacgagggcgggcgcgccctgttccccccaggaaccctgggtcatgttcacggactggacggagccgtccgccgcggcgtacacgtaaaggaggttgtttttcaacgctccggaatccgtcaccagcttcagtttattattgctggcgtccagagcggcccggaggctgtggatttctgcttccttgaactggatggaggtgttcaattcactgttacgggtgccgattttttccagttgggcccggcgttccttgagggtattaagttccgccgcggcgcggtccagagcggcttgcgcctgggaggcgttcccctccatctccacgatgtccggtgaggccagcgtgtacagcagttctcccttgcgtacctgctgggcggactttacgttgaaggtgacgcgcccggcggcaggaagggcgtacgtcgttaccgcatggggaggaataaccatctggccgtgaagggtcttttccgcgccgtgagtggcttccgtcaccttttcaaagcgcatgtccagggaatggcgcgccttttcatccacatgcacgggaatcatgtcccccggctggccggaacctttctccgcggcctcttcatgtttgtggtcgcccgtgcaggcttccccctctgcatgctggtggccctcaggctcgtggtcgcctgtgcagacggagccgtccgcgtgcttgtgttcctcatgggcgtggccctcggcgcaggtttccccttccttgtgctggtggtcttcatggccgtggtccgccgtgcaggcggtgccgtcctcgtgtttgtgttccgtaggtgccggctgctctccgcgtgcgggattgaggctgaaaacgggagccaggcccaggataatggaaaaatagagacgtttcatgttcgttaaaatgatgaagatttttatttggattgaaggttggcgtgggtgaggtagcgcagctgggcctgaatggccagcagcttgtccagattgtccaggaaagccagacggctttcataaagctggtggcggttttccgccagctccagcagggaggcttccccgatgccgtgcagtttctccatggtccggacggaggaggcgaaggactccatgcgctgaagctccgtccggcagtggcggagcaccatctgctggctgacgtcaagctgtcgggcgttgaacaactccgttttccaaagctggatggtttcctgcctggacaggttccgtgtgccgcgcgcttccgcaatggccttgcggttgcggttccagagggggagattgaaccctatttctccgcccacttccttttccccgtcgtcacgggtgaaggagggcccgagctccagttccgggtactgccggcggatctccgtcttgaacagggtttccgtggtggcgtaggttgccagttgggccttgattttcggggctgaggccagggcggcggggccgggggccggaacggcggcaggcagttggaagccctgtcccgtcaggaagccgagcttccgtgccgcggagggatgcagccccatcagcctgaccagctccatcttctgctccagttccgtttccgtcacggtctggagttcccggatggcgtcgttcatgcgctgggaagccacctggcgggaggaaaattccacttcccctgcgccaatgagtttttcaatcacgccgttttcctgccgcaccgcatccaggcgttcccggatgacggccttgcggcgctgggtaacggccagcttgctccaggcctggtccagggaactgagaaaatccagttccgcctggcggagggtccagaagtccgcctccttgtactgttccgccacctttttttccagggcgggaagacccgtcacgggaatggtgaagcccaggctgccggacatgttgagcgtattttcctggaggacttgttcaatatcccaggaaaaggacggatcgttccaccagcccgattgtttggctgcttcattgctggaagccagtttcaggcgtgccttgttcagatccggattcatgaccaggccgatctggcgtgcctggttccgggtaacggagatgtgtgtgtccacgcgggatgcctctttccaggaggcttcctccgcgttcaggtcgatgggcgcgctgtgatagacgctgcatgagctgaggaaggcggtcaggcctagcccagcgaaaaatggtatggatttcatgatgaaaaagagaatagaaatagttcggtccaatcaggtttggacaatgcggcaaataattccgcggaaacaaataaggccggacgcaatcaacaagcagcgttcagccggaaacgtccctgggacgtttctgaaaaagggccgttaaatcagcaggggaagttgaaagccttcatgtatcgggccgtcgtccctgaaggggtcagggggggcgggtattgcggaatccgatgtttggcttgttaaaagaagagactgtgccagatgatggaaatccgggaaggtctgccagataatgcagggctggggaagcggcgcatgaagaacgggcagcgtcaggtcgtcaatctccagacgctggtgttcgcagaggtgcccggccagcgggctggaagtgctgctgccgggaccatggtccccacggcatccgcagggtgcggcatcgtgatggcaggagcaggaaaagaggaagacctcctgatggcaggggcatacggaaaccatgcccgttccgcctacaatgaccagcagaagggtgagcagcatgatgccgttgcgcaatgctctaaccatggtatgccgcgaatcctagaaaggagccgtgaaagcgtcaagagcaaagtggcggatgtcggaaccttgaagaaaccgggctgttatttcccagccgctttacggagcaggtccacggtgtgttcaaaggctacgccgcgcacgtcaatgatctgggatttttccgctacggccccggtgatttcctccttgaattttccggcctgttcctccgtgaacaggtttttggagatcagggagcgcgtaatgagctggagaacgtactccgtttccacaaaggactggcggcctaccgcctttttcatggcttccatgaattcgggggcgtgttcaggcgagagggctgcaacggctttttcataagcctgtgcaaaggtgttcaccggggccttggaaacttccgtcttggtcaggtcaaagctggattggtaggcaagggccccttcctccgccagttgaagggcgttcttgccgaatttgttgacggcattcatgtccgcccctttttccagcagcagggccgccacctggaagttgccgcgcatggccgccagcatcagcggcgtaaagccgttgccttcccggttgttgatgtccgccttcttttcaatcagcatgtcggacaagcggtccagcccgctccaggaagcccagtgcagggcggtccatccgtccttgtccttctggtcgatttccacgcgggggtcttccagcaggcgtcccaggtagggcgcacgcttggcttccagcttcagcgtggtttcaatgttgttgtagttggcgtagcacacccacatgacgggcgttctgccgtgggggtccgtcatgttgacgaaggcttttccttccttcgccgccagttgttccccttcttccagagtttggtcgaattccttcattcccttgactctggcttcctgttcctcctgttcagaggaggcattgacttccttggcctccgcctttttcatcacggtgatgaggtccagggccggattggggtctccggagaaggatttggaaaccaccaggctaatcccgcccagaatggaactgaaagccaccaggatgagggagtccacaatgatgttgcgcgtgtgctggttcatcgtcttgagaggttaggagttggcttccgtgagttcttccgccgtaacggcggggtccatttccgtttcaatggccgcaatgggcggggagtccgcatcttcctccggatggtcggaggtgatggtcttgcgggtcatgatgatggcgatggggctgatgacggccatggccaggtaaatggtccacatgaattcgggtgaatcccagaagccgatgtgcccggtatccatcttggcgcagatgccgtcgtagcagaggtaggcgaccagcaggccgccgatgatgccgttgatgggcttggcaatgaacatgggcaatgccgccagggacatgtaggaggccaccttgtccttgggcgccacgcgggccacatattccgagaagcggggggagaacagcagttccccgaacgcgaacaccagaatctgcgtcacaatggctaccagatacgcctgggagcgcgtttcaatgccgggcaccaaatagtaccattcaatgggaatggccatgaagacaagggagaaagcggaaatggacatgcccacgatcatgaggctgacggtggagaagcgtcccagcaccggaatgagcaggatgaggccggagacgatgatggccgggttgatggcattgatggagccgatggcaaagtcatcatacagggtgcgcacgtagtatttgggcatgaccaggaattgcagcgtgaagacgatgcgcacgcccatggtcagcaccaggaagaggatgagcttgcggaaggcggattccttccacacttcccggaaaagctgcaggggccgccggaggggcgctttcaggttggcctccttttcactgggttccgcgtagttgtcttcgtcaatgaagcgggtggtaatgcagcccagcagcaccatcagcgtgccgaagttgatgatccagtagccgccgtccacggcgccgaagtgcttgcggaagaattcaatcaggaatacgttcgcgatcacggcggcaatgttcatcagcagataataaatattgaaccccgtggcgcgcgcattcagcggggcgaagcgccggatggaggtctggatgacgggtgacatgaacgccgtgccgaaggacatgatcagaatccccgtcatgaccaccagcctcccggagtccacggtggggctcagatccggcccgaatcccatgatgagacgcccggcgatgaggatgatgaagccgatcaggtacgtgcgccgtatgccgatgatgtcgcagatggaacccaccgcaaagacgaaggcggagatgaacagggtgtacagccccacccacagggccgcgtccgcatcgttgaaactgcaatagtccgtcaggtagaggacaaataccgtaatcagggagaagtaggccatgccgtcaaagaactggacgacgttggtgagccagaaatctttagatacggtttttaggattttgaactcggaaaagtacttgatgatagggttggcggactcgttcatgcagaagagagtaaattttgacgacggtggaagagtgggttacccgcacccccgtttcaagtttttttctctcaaaagccggattaaccggaaaaatgcgcgccgccgtcacggcgcgtcccctatctgggcagaatgcgccggaagcccgccacattgcaccatgacagcgccttcaggcattgttccacggccatggcgtcagagggcagcaggggccacaatccggcttccttcagcccggatttggctatttccgccgccttccattcacggaactgggtgggaagggcggagaaggtgaagaaggcccagcaggccagcccgatagccagcgcaatctggaacttcaacagcccggtggccagcatccccagcaggataagagccgtgaagaagggaatcatcatggcgcggccggaggcggtcttgcgggctttggccgccgcagggtcttccctgaccaggctgctcatggcccaggtgtgggccacgcaggccaggcgccccgcagttaccttgccctcccaggcggggggcaggctgatgaggccgttttcatccacaccgggaaaacgggcctccgccagtttcctctggcgcttctccgcgccgtccaggcggtgaatcagccccgccggacccggaaatcccggcagttcacgtgattcataagtacgcagcggaatgacgcccttggtgaagcgcagcgcggcaatgacgccgagcacgaccacggaaaggaaaatcactactgcgaatagcatagaccgctttttctcatacagccgcctgtccgtcaatctccccggatggcatgacccgcgctctggcggttctccgggtgcggatggccctctcctccgggaaacgctggatttggattgcttttgcggctcttttcatgtaattgctgaccgcaatggtccatatccgggaatgcatgaggaagtggctgccgtttgttctgatggcggcggctctcggagtgtctccggcccaggatgtggcgagtcccgatgccgcggagctggacctggacctggttaaattgaagaaggggcccaagggcaaacagcgggaagccatgcggaaggcccttctgctcgtgcatctgaagcagaaggaaacctggctggcggagtccacgggggaagccgcccttcacctgaaggcggaaatttccttccggcggtaccttgccgcggtggatatggccggctgcccggaggaattcaaacgcgcgttccgccgttatgccggactgctgaattcttttgaagagaaaaatttgaagagcgtgaaggatttccccccggctcccttgcaggaggccggaagggagcttttccgggtattgctgaactaccgtctggagccggagcatctgctggaggaaatgaaagcgctggtggatgaagaggtggaaggtaaagaggagctttccccggagcagatgatggacattgtccgggaagtgcgggaagccctccaatccggcagacgcccttttcctgcggaaagggctccggaggacagggaatgaggcatggcctgtttttcacctgtagttttgttgaatccattcaacggctttcgggttttgcggcaggtaggtttttaaaacttccctgatacgctccctggattgacggttcgcggggacctctccgtccatggcggcaggcatgatcgggaacgctttctgccgctgcgcctgttgaagatagcgggcataggcgtccgggtgccgttccgcctcctccctggacggaatttccagttttcccatcaggtagagcaggtaaagggcctccgggttattcagcgcggctgctttttggtaaaactccatggctttccgttcatcccgcatgatgccgtattcttcgtctccgcaggcatacagccgtcccagttccagggaggcgggagcataagactgtctgtccgcctgtatcagataggcgaggacttcggaagggttttcggaaatgcattccgtgaaggcttcatactgggcctgcgggcttccatggtccgccgcttttttgatccagtaattgtattcatcgactttgagatcgtttttggagatgaagttatgatccgccatttggcgcatggcgggaacgcagccagcctgcgccgcttttttcaacagtttctccttctggtcaaattgctcaaagggggagagctccatgtattgccggtacagttcctcgggacaggcttccctcggggcggctatccagtaaatgcccagggcggcagcgaggacggcgcctgaaatgattaatgcggatttaatgctcacaataggtgagcggttgcccggcagaattttgtctgaaaaaacggttggaaaaaggagtggggcgccttccggttacggtttccaggcggcggccatcagggtctggaaatggggaggttccggttccctgtccacaatgtccgtatggatgttccggaagccggcttccttgagcatgctttccagagcggcgggcgtgaagcccagccagcggtccgcatagagttcgcgggcttcctcctgcccgtgctggagcaggtccagaacgaccaggcagcctccgggtttcaggatgttccaggcggcttccagggccttgaccggcttttgggcatggtgcagggcctggctgagcagggccaggtccacggtgccgggatcaatgggcggcgtttcaatgtcgcccaggcggtattccagattgtccagcccgtgcttgcgcgccagttcctgccccagttccaccatgctgggggagttgtccacggcgatcacctgcttggcgctgggggaaatgagctgggagacgaagccttccccggcgcccaggtccgccaccacgtcataattcaggatgcggagcagggctccggccagcgccttccaggaacggcccggagcgtagttcttgcccaggcggcaaacgacttcatcaaagtaggcctgcgtgcggttcttgcgcttgtccagaatgacctggagggcttttttgtccgtttccgcctccggcagttcctcgcaggctttcagggccacgttgtgcaggtcgttggccagggagagggtgtaaaaaacgtttttcccggagcgggtgtcctccaccactccttcctgccggagctgggcaagctgcgtggagatgcggctctgccccatgccgagaatttcctggagctccgcaacgctcagggattcttcattcagaacgttgatgatgcgcaggcgggtggggtccgtcaggagtttgagcgtttttaggattgacttcatggtagaataatatatcaacgcatcgagatttatcgatatgagtaaaaacaaccctcacatcttcacgtcggaatccgttggagaaggccatccggacaaggtggccgactacatttccgactctattttagacgcctgcctggctcaagacaaaactagccgcgtcgcgtgcgaaactttggtgaagagcaacatggtcatcatcgccggagagctgacgaccaaggcggtaatcaatccggaaaagatcgcccgccaggccatccgggagatcgggtactgcaaccggcaggacgacgacgtgttccatgcggataccgtctttttcacgaacctgctcacggaacagtctccggacatcgcccagggcgtggacgcgcgggaagcggagggcaagggccacgcggagcagggcgccggggaccagggcatcatgttcggcttcgcgacgaacgagacgccggagctgctgccggcccccatcgtgttcgcccacaagctgctcatggaactggccaagcgccgcaagcgcgggcatgtggactggctgcgaccggattgcaagtcccaggtggccgtggcctatgatgaggccggacgccccgtgcatattgagaacgtggttatctccacccagcacacggaggaagtggaccatgatacgatttacaattactgcgtcagactcattaagaccgtgcttcctgcggaactgctggatgacaggacggagtacttcatcaatcccacggggaaattcgtggtgggcggcccccacggggattccggcctgacgggccgcaagatcattgtggatacgtacggcggcatgggccgccacggcggcggcgccttctccgggaaggacccgtccaaggtggaccgttccgcggcgtacatgtgccgctgggtcgccaaacacatcgtagccgccgggctggcggacaagtgtgaattgcaggtggcctacgccatcggctaccccacccccgtttccatccgggtggataccttcggcaccggaaaggtggaggaaaaagccattgaaagcgcgctggaaggcattttctccttcaagcctgcggacatggtggaccagctcgacctgctgcgacccatttaccggaagacgacgcactacgggcatttcaccaatccggagcttccctgggaacaactggacgaaacgcgcctggcctccctgaaacaacttcttcattaatccaacgacaacgtttacagacatgttttcagaaacggaacaatacaaggtgcgcgatatcagcctggcggatttcggacgcaaggaactggacattgcggaacatgaaatgcccggcctgatggccgtgcgtgaaaagtacgcggacgccaggcccctggagggcgtgcgcatcatgggctccctgcatatgacggtgcagacggccgtgctgattgaaacgctgacggccctgggcgcctccgtgcgctgggccagctgcaatattttctccacccaggaccacgccgccgccgcgattgccaaatccggcacgcccgtgttcgcctggaagggggaaacgctccgggaatactgggactgcacctggaaggccatgaactttccggacggtctggggccgcaattgattgtggacgacggcggagacgccaccctgctcatccaccgcgggtatgagatggaggaaggttccggctgggtgaacaccccgtcggagtcggaagaagaggaagtcatcaaggacctcctgaaaaagatcgccgcggaaacgcccggcattttccaccgctggctgcctgagctgaagggcgtttccgaggaaacgaccacgggcgtgcaccgcctgtaccagatgcaggccgcgggccgcctgctgattccggccatcaacgtgaacgattccgtgaccaagtccaagtttgacaacctgtacggctgccgcgagtccctggtggacggcatcaagcgcgccacggacgtcatgatcgccggcaaggtggccgtggtctgcggctacggggacgtgggcaagggctgcgcccagtccctgcgcggcatgggcgcccaggtggtcgtgacggaaatagaccccatctgcgcgctccaggccgccatggaaggctaccgcgtgctgacggtggaggacacgctgggctgggcggacatttacgtaaccaccacggggaactgcggcatcatccgcattgagcacatggaaaagatgaaggaccaggccattgtgtgcaacatcggccacttcgacaatgaaatccaggtgcacaagctccagacctatcccggcattaaacacctgaacatcaagccgcaagtggaccgttacacgttcccgtccggcaacagcctgtacctgctggcggaaggccgcctggtcaacctgggctgcgccacggggcaccccagcttcgtgatgtccaacagcttcgccaaccaggttctggcgcagctggaactgtggaatacccgtgaaaaccgccccgtgggcgtggaagtgcttcccaaggtgctggatgaagaggtggcgcgcctgcacctcggcaagatcggctgcaagcttaccgtcctgcgtccggaacaggcggactacatcggcgttccggtggaaggcccgtacaagccggacttttacaggtattgatccggcggggggctccgttttccggctgtttcatcgggaagctttcccggtggaacggctttttccattttcgcggcggagcaggggagggaattcaggtgtgcccactgttttttccgtgaaaagataagaggggagaaaatgctttccggcattggccattgttgaaggagcgggaaaatgaagtccgtttccggcgcagaatggggttttggctccgcgccctggatggagggaatgaaagaaatattcttccggagtgagcttcatgttttgctttcctgttatatcagccagtattccaactcaacgtttccccttgaacacaccactgccggagaaaagaagaagccggttccggaacgcagggaggaattcgggaaaattaaagtagcaccggcttgtttcctgctggtatcatgcggcttgcttgcaggcttaaaacagccctgtttcacgggcgggtttgaaatccggtgagactctgcagtccggaacagttatgctccgggatggtgggcgcaaatcctgaatcaacgctccatcagttctttttcacgggtgcgtgtcgcctgggagccagggcctcccgggcctgatggatattccctccggagcgcagagacggttatgcaagcaagagcttacgccatgctccagaaggggtttcagccacgagaggccggaatcttccgttcccgggagccggagccgcagcttcgccgttcatcaccgtcgcgccgttcccgttcctgcctgctccatttttttgtgttataccctcccggcttttttgaaatgaaaagaaagcttatttacgtcaagaacggcctctgtcgatgccggagtattggcaaacggaattttccgaaaatgtttttctttcaaatgtgcaggcttgaccccggatttcaaatccgtaatgtattcatgaagccgttttaatggcgcatgctcccagggtgcaatccatgtttttccaatgccttccgttgaagggcgcgggttgctcccctacatcaaacgtaccatggatacttcttcccggaaaacggctctcgttgtgttgttcaaccaccagtatgaccgcaacattccggtaatcagggagatttattcaaggcgtttttccgggctgcttcaattaatgccctattacaggggggacgctccggacgtatgttctgtattcggcaattcattccagttttataattatattttacaggcccgggaaagaatcaggaatctggatggcgattatattctcatcatcggagacgacctgctcctgaatccccggtttgacgagttttccacgccgtctctgctgggaatccatggggaggatacgtgctacctggacggttttgtggatgtctccctgccggtgtgctaccgtggaacggtggaggcccaccgtttttccacggctcccgccggcattgatgcggacagcgtcaacaagaatgttccgccgtacggggaagcccgtcagattttgaaatccaggaacctcatgcagcatgacgagctgtcccgcgtgcgcatgttcctgcccaagtggagtcccggcggcggcattcatgccaactggaaggtgctgaagggcagaatctggcatctgctgaaccactggaagcaccggatcaaaaagtaccggtattcctatcccgtcgtcttcggttattcggacatcgtgtgcattccgaaagggaagtttgacgatttttgccgcatccttgaggtattttccgcatggaacatgtttgtggagcttgctattcccacagccttgcagctccttcccggaacgcggctggctacgctggaagacacgcagtacaagtccggaaacgtctggttcccgcaggatccggaacattttgaggccatgaacgccgtcattgacgggctggtgtcctcttccggcggagacctgggcaaattgcttgcctcctttccgcaggaatacctgtacctccatcccgtgaaattgtccaaattcggtgcgcgtggtctttaatccattgattttctttattccatgatgaaatatgctgtgatcggagccggagtttccggattgtccatggccggaatgctcttgaaaaaggggcatgaggtagtggtttacgagaaggacagccgccccggcggcctagtcaagtgcgcggaggtgcagggcaatttgtaccacctggtaggcggtcatgtgttcaattcccggcggcaggaggtattggactggttctggtcccggtttgacagggagcgtgattttgtttccgcccgccgccgtgccgtcatttccctggagggcggggctgtggtggattatcccattgagaaccatctcgaccagtttccggaggccgtccgttcctccatcgtccatgaactgctggagctttacaggaatccccctgcggaacccagttccctgggagaatttttccggaaccgtttcgggaagaccctgaacgacctttatttcacgccctacaacaacaaggtgtggcggcaggacatcaacggaatcgccatggactggctggaagacaagctgcccatgccgaccgtggcggaaatcctgttgaataacattggtcgcgtcaacgaaagcgccatggtgcacagctccttcttttatgcaaagcgcggcggctcccagttcctggcggatacgctggcgcgcggcctgaaggtcaggtaccgggcggaggctgcggacatccgtgcgcaggatggaaaatggctcgtgcagggagaattgtttgaccgggttgtttttacagggaatgccaggcagcttgcggactgctttcccggcgtggatgaactccgtccgttccttccccggatttcggcattgcgctcccacggcaccacctccgtgctgtgccggattgaccccaacggctatagctggatttacatgccctccccggaccaccgttcccaccgcatcatctgcacggggaatttttccaggaacaacaataacggagacattaccaccgccaccattgagttttccgagcaaatgacggaagaggaaatcaggcggcagttggagcttattcccttttccccctcctacctggcccatcactgggaggaatatacctatcccgtgcaggatgcgtccagccgggccctgatccgggagctgaaggagtgcctggaacccaggggcatttacctgctggggcgttttgcggagtgggagtattataacatggatgcggctatcggcgccgccatggacctggataagcggctggacgcggagcttcaaccataagggcgccccccgcggacgcgggaatataaaaaaggcgtttatcggcaagtatccggccaacgctgtggattggtaatccgctgtcaatggaaaattttaacggagaacgaattccagatatttgacgtgtaataaaaaagattttccatcatccccgtaggatggcctgaacagacaactttttcagggttatatttttacaggttctcttttattttctccaaacaagcggattaccaactcgctagaaagggcgtgcagaaagcatggcccatgttctacccggccatgcgtttacccggaatcaacgcgcatggctattcgttattgttctttcgcgacacgcggctaccgctggcggcagtggatgcggatgacaagtttaaagctggcggagccttccgtggaattgtctttctggaatcttggccgccttctgtccgcaggcatcaggcgcgaagtgccctggtttgaccctcatttgcatggggccggttactggtgctggaaacccttcatcatgctcagggaactggaaagcctgcaggaaggggactatttgctttacacggatgcggggcgtccgccgggaacgcttttccgccattcagtacagcctcttgtccaatggctggaggagaaggggcaggatatcctgccgggagtgaatatctcctattacacgggagatttgtcaagatggtgcaagcagagcgtttttgacgcattgaatctggatatcagggatttcgagcatagccccctgattcagccgactccgtgtttcctgaaaaaatcggaagaaagcgtccggattcttcgtgaatggatggaactatgccggcagttcagcctggtgtcttccccgactccggaggaaaaaagccgctgccgtgacaattttgcggaccatacgcatgaccagacgctgtggtcgcttgttgcggccatgaaccatctggattgcctttattccgggaagggagtcatccatcttgacgggaggcatccctttttacggcaccccggatttgatgacaaggatccggacttctttttgggagagcttggagcggagagggtggaaaggcctttgcttacctttctctccggcgttcaccatgcaattgctttttgcgagaaggccgtgaataaattgtccaagatcgccggattgggcccccgcaaaggtttttacgggtaaagacggggtggaatagccgggatacccagggaataaaaaggcgccggaatcttccggcgcctgggaaaagttccgctggaacggcttcctaccaggaagcgtcaaatttgggaatgggcgttccctttcctccggggcagttttccgggaccttgtacgccttgcggagttcgttgtagcgcttcttgagctgttccacggtggacttgtaggcgggatcgtcaatgacgttcttcatctgcatgggatccttcttcatgtcaaagagcatccattcgtcactggtccagatgtaggagagcgtgtagcggtccgtccggatgccgtcgtggcgcggggcgttgtgttcgccaggattctcgtagaagcagtagtagatggcgtccctccagttgtccggcttcttgcccgtgaaggccgtgggaagcagggaaacgccctggaaggtatccatgttttccggggtgtccgctcctgctgcggaaacgatggtgggagcgtagtcgatgttctgcaccatggtggtattgcggatgcccgcggggatttttccgggccatctcatgatgaggggcatgcggagggattcctcaaaaatccagcgcttgtcgtacatgccgtgttcgcccatgtagaagccctggtcgccgcagtagatgaccagcgtgtctttggaaaggccttccttgtccaggtatttcatgaggcgtccgatgctgtcgtccacggaaagcaggcagcccaggtagtcttccatgtaggcgtgccatttccattccgcgaaggctttcgggtctttcagcttcccggatttcatgccgtccaccagggacttggtgcgcttggcgtagtagttcgtccaggttttcttttcttccggggtcatgcggttcagttcgcccaggtcccagccgtagccgggggagacgatgctcttgcgcatgtcttccggcacctggtccttgagcaccttgaggtcagaataaatcgccatgtgcctggctacggtctgctggtttttcttcaggaattccgggcggttggcgtagtcgtcatggaagttggcgggcggcgtcagcttggacgtgtttaccttgcccagatggcgcagggcggggcaccaggcgcggtgaggagccttgtggcctacgacgagaaggaaaggcttgtccttgtcccggttttccagccattggatggatttgtccgtgaccacgtccgtggcgtagccggggaagcgcttcgtctggcgcttcccgttcggcttgaggctgatgaaatccggattgtagtaactgccctggccggggaagatttcccacgtgtcaaagccggtggggtctgattccagatgccatttgccgaacaggcccgtctggtagccggctttttgcagcatcttcgggtaggtgggctgggagccgtccagcggcctctggccgttgaagacgaagccgttcatgtgggagtgtcttccggtcaggatgcaggcgcgggagggtccgcacagggagttggcgcagtagctgcggtcaaagaccatgccttgtctgcccagcttgttgaagttgggcagcgagacgggggaatcgttcttggaggtgcccagcgtctggtaggcgtggtcgtccgtgatgatgaaaaggatgttcggctttttattccccgcagccttggtctgggctgtgaggggagctgccgccagcaggaccagagttccggcaatgatggttttcaaaggtctcatattgcatggaggatataggatgaagccaccgtgtcaatgtcataggattccttttgccgggattttccgttatgatatcattttcccatgcattcctccccgttggaagacacgctgcgtttgttcggcaaggagcggttccgccccatgcagcgggagctgatggagtgcgcgctggcgggccggtcctgcatcggcattttgcctacgggttccggcaagagcctttgttaccagattccggcagtgctgggagacggggtgacggtggtggtttccccgctgatcgccctgatgcgagaccaggtggccgggctggaaaagctgggcgtggccgcggccaggtatgattcctccctggcggaggaagagaagggcgccctgctggacagcctgaagtccggggccgtccgcctgctgttcgccgcgccggagtctctggaatccccgtggatgcggcaggccatggagtttgtttctcccggcttgttcgtggtggatgaggcgcactgcctctcggagtgggggcacagtttccgcccggattacctggggcttcccgttttttttaaaaagcatgggttccggagcgttatggccctgacggccacggctacggaacgggtgtgccgcgacctggccgccctgtttgacgtgcaggaggactgcatcttccgcgccgcgccttaccgggcgaatattttccgccaggcggaagtgctgaaggagcaggataaaaccgcgcggctggtgcagtttttgaaagaggacggccaccgtcccgccgtggtgtacatccgcacccggaaggatgcggagaatctttcctatgaactggggaaggccggtttttccgtcaagtcctaccatgcgggcatgccgccggaaacgcgggggctggttcaggatgagttcctggcgggggcggcggacgtgctggtggcgacgatcgccttcggcatgggaattgacaagccggacgtgcgctccgtggtgcattaccatccccccgccagcctggaagcgtatgtgcaggaatccggccgtgccgggcgcgacgggctgccttccttcagtctggtgatgctgtccgggcgcgacggcgtggccgtggtcaaccgcctgcatgcggcggagccggaacgccatggcgtaaaagggctggcgtccctgctgtcccggaggggagagcatattgtgtccctgtatgaggcctccgcggtccatgacttgccggatgtggcggtggaccggatgctctttgacctgaagcgttccggttccgtccgggaacagggcatggggtacaagtattacaaggtgcgccccctgttccggatggaggaaatcctgtgcggccgcgatggggaggaacgttcccggctgcaatggatggacggccaccgggagggggaagtggaggctctggccgcggaatgggggatttcctgggaagaagccggcgcatggcttgacgagctggtcctttccggggaatggaaggtggacctgcgccagacagcccttcacctgcattcggaagggtttgatgcggaagaagccgcggaggaattcgcgcagtatttttcccggtcccggctgaacgggctggaacgctggaaaacgtgcgtttccacgctgacgtcttccgcctgcctcaacaggagcctggacgcctacttcggcttccgggagccgtccggaccctgcgggcattgtccggggtgctgcggcgcagtacctgcggagatggaattggaggaacccggaccgcttccggaagaactgcgttccgccgtcatggagctggcggcgcagaggaagcccgcgctggcccgcccttcccagttgacgcgttttctgctggggctggcttctccggcggccatgcgcgcgcggctgtgggggcaccccctttacgggacgctggcggacagaagctgggaggacgtgtggatagaggcccgcgccctgttggggaattagcggtcagctgccgcctttggcggcctcataagcggcaatgatgcgcttgcaggagttttccgcatgcagcagggagcaccagtagcgggaaatttcctccgggctgcgttttccttcatcccaggcgcggatttcctccagcagcgccccggagacgctttccggggtgtcttttgggctgagcgtgccggaatcatgggaaacgtaccattgcaggcagttcagcaggggcgtaaggcgcggaccaacgacggaagccccggcgcagagcgcttccgcggaggcgacgtgcgttccctcggaccgggaggtgcagaggctgattctggcttgggagtatttcttttgcagctccgcgttgggcaggtagccggccaggcggatgcgggcgcggaggtcttccggaagattgccgtgccattcccggaggaggggagggatgttcccgtagatttccgcttcccagtgcggtgcgcggggcagggcctgttccagcgtggccatcagcaggaaggggcgtttgtagagaaggtcgtcccagcggcccacggccatgatgatgttgcgtttctccccggcatagcggcaggtggaggaaatggggttgggaatgagggccagtttccggacgatggattttccgtagagccattcccggtcctgaatggatttgacggctgccggcatggggaaggctaccatgtccccctggtccaggtgttttcttcttccccggctggccaggttccaggtgtgctgtttcagcaggcgcagcaggaaaaaggcggtgcccctgatttttccgcgggcgaagacgtccctggtccacatgttttccgcgatggggagccagtattgccacggaaaaaacagtccggaggaatccatgtacaccaccaggaagatgcccgcgtcatggatggccctggcgatgggaagatatttgcccgtgccccaggcgtacaggaccagtccgtcaatgcccagggatttccaccaggcggcgtcttccaggttggcgtactccgtgcggatgaggtcggggtcgtccccctcctggacgggcgtgggcatgatggccctgctttccaagccgatccgctggaaggctttgcagaaagccccggaatcacgggaaaagaaggtgtggtcccctttgaagggaacgggagtgcaggtgtaccatttcatgatgccgtgatgttgggggattgacggaagaggcggagttcctcaagaaggctgcccatggactgaagccatgcggcgggagaatacgtggaggacaggagctgctgcccgtgcgcgcccatggacggccagcgttcctcttcctccagggcggtgcgcagcgtttccgccagcgcgtccgcggaaggttcccgggcaatccagccgttccggccgtggctgatgagctccggcaggccgccgcggggggtgacgatgacgggcgtgccgtggagccatgattccaggacgaccatgccaaaggtttcctcccacagggagggcgccacggccagtccgcaggcggcgcgcacggcgccctgttcctcatggggaatgaacccggtcaggcggatggattcaaggcggcggaaagcgacgtagcgctccagttccccgcgcagggggccgtcccccatcaggtagagggtgcggccgggaggggcaaggcgttcccacgcctgaaccagtgggaggacgcctttttcctgcgtaaggcgtccggcgtaaagaacgtcccggcgggggtggtccggcgggggtggtccggcgggggtggttttttgccggatgaagtggggaatgaccctgattttgtcctccggtattccggtttggatgaggagctcccgctggcggcggctgacggcgatgtaggaggaaaggcggttccaggtgcccatgcggcgcgttttatacagcgtagcggccgccagggcggaataggccgcgctgccgcgccagcaggcgtgcaggacgccgggaaggtagttgccgtttttacaggagaagcagggggagccgtcccggtagaataccccgttgaggcatccggcgcggtagttgtgcaggtagtggatgacgggaacggattgcttcagggccagcccgtagacgcagggggacatggccgggaacgtgttgtggatgatccacgcgtcatagcggtctctgcgcaggcattcgcgcagcttttcctccacgtccctgttgcggagcatgtagcgcattttcgtcagcgcgccgtgggggctctggaacagctccgcggtggaatagacaaagggggtgacgtccgccacggcacgcagctcttccgtgatggcgcggaagcagacttcctccccccccacgtcgccgtagcggctgaaaatatgtagaatgcgtggacgttgcatggccgcggcggaacggactatccctggagttccctcctgagcttctggggatccttcaacagctccctctggatggcttcctgctgctggcgcaggcggtcttcccgggattggagggcttttctcccggggcctacttcggaattgacgaaggggttgttatccccccatttggaccaggggccgcgggggatgcggtagaattccacaaagcgccagtggacgacggccgttccgccggtgatgcccaggtagtcgcgcacggcgggggagatgtcgatgcccgctcccttgttttgggtgttgacggggggcttgtcgccgaagacatagggccagtcttccgtggtgaaggggccgcagtcctcccactgggcaaagcaggagcgcttgttgtagacgatctgcacccacctgcctttgcagacggattgccctttccccgtgtattcccggcggaaccacgggatgacgcgtgacgcctccgtcttgtgctctcccttgcaaacgtcattgtagggcagcgccacgtaaaagggattttgccgggggacgaacgttttcgggcggaagtccacggtgcggcacacggggtccggattgtcgaaaccgccgaagttttcccgccaggcggagtcccacgagctcttgtggttggctaccgggttgcgctccgtggaatcctcccccacccagaagaccgtggcggtgatattgagccgccagggataggtgccggggctctgcctggccgtcctgggaaggatgcggggctggggcgtcgggcgtttgccgcccgcggccgcggcgggtgatttgacgatgaccctgggcagcgggtcccgctgcgtgggggtgatgatgacggggcctttgggccgtccggagctgtccgccagggcgcgggttgcgctccggcccgtctggatgtccgccctggcggcccctgccggagccagggccagcaacgcaagcaggcatgcggaaaggaaggagttcccagcggaacccttccggaatgcctgttgacgttgccagtgttttaccatcggtgcagttgagtgacgaagcggtgatccagcttgccgggataatccgtgttgaagtggagcccgcggctttcattgcgccgcatggcgcagtccacgatcagggaggccaccgccaccaggttgcgcagttccaggatgtccggcgtgatgcggtacccccagtagaagtccttcacctcccggtgaagcatccggaggcgcgtggccgcgcggtccagccttttgttggtccgcacgatggagacataatcccacatcaggcggcggatttcatcccaattgtgatagatgacggaaagttcgtccggcagggcggtatccccgtggtgccacgcggggatgtcgtaagaagtgggggcatcctttctcagcggctggagggagagcatggagtccagcgcgcgcttggcgaccaccacgcattccagcagggagttggaggccaggcggttggcgccgtggaggcccgtgcacccggtttccccggcggcgtaaaggccgtccaggctggtctggccgttgacgtccgtcaggacgccgccgcactggaagtgcgctgcgggaacgaccggaatgggctccctggcggggttgatgccgtagcggctgcaggtctcgtaaatcagggggaagcgctcctggacgaagccctccggcttatgggagatatccagatagacgcacatgctgcccgtcctcttcatttccgagtccacggcgcgggcggtaatgtcgcgcggggccagggatttgcggggatcgtacttgtgcatgaattccttcccgtccgctccgatcagtacgccgccttcgccccgcacggcctcggagatgaggaaggagcgcgcttccgctccttccgcgcgggtgttgaagaagcaggtggggtggaactgcacgaattccatgttggcgatggtggctcccgcgcgccaggccatggctacgccgtcccccgtggcggaatcattgttggtggtgtacaggtacacgcgtccgcagccgccggtggcgagcagcacgcggtctgaccggaaaatttccacttccccggaggcgcggtccagcacgtaggccccaagcacgcggtcttccgtgaccagacctagtttggtcgtcgtaatcaggtcgatggcgaagtggtcttccagcagttggatgttggggtggagcttggccgcctccagcagcttggaggtgatttccaggccggtggcgtccttggcgtggaggatgcgccgcttggtatggcctccctcccgggccagttcgtaatcctccccctggttgccggggtcaaaattgacgccccattccagcagttcccggatggcgccggggccttcctccacaatggtgcgtacggcctgttcgttgcagaggcccgcgccggcgtccagcgtgtccgcaatgtggtcttcaaaggagtcgttgcggtcccaaacggcggctatgccgccctgcgccttggcggaactgcaatccagaaatttgccttttgtaatgacggcaaccttgccgtgttccgccgctctcaaggcgaaactcaatccggcaacacctgccccaatgactaaaaagtcgctcgtcttcatcttgaatggtacggaactgtagcataacggagaccctcaagtcacgcccaatgatggggcggcggggcatatttgtctggaaaagaagcgtgaaacacgctaattcatgggcatgagaccccaagggaacgaacaggaggcgcgccggaacaagcatgtgcgcagcgctccggccaaaattgccgtgaaggcgctgggagaggatgtgctggacgggattctggacaagtcccccaaccccctgctgctgattctggactgcgtgcaggacccccacaacctgggagccattctgcggacggcggacggcgcgggcgtggatgccgtaatcgctccgcgtgacaagtccgtgggcattacggagaccgtgctgcgcgtctccgtgggggcggcggaaaaggtgcctttcatccaggtgaccaacctggcgcgcaccatgaagcagctccagggccgcggcatctggatattcggcacctcggacaagggggaccgcgacctgtatgaaacggatttcacggggccggccgcgctggtgatgggcgcggaaggggaaggaatgaggcggctgacggaagagaattgcgacttcctgatcaggattcccatgaaggggagcgttccgtgcctgaacgtgtccgtagctacgggcgtgtgcctgtatgagatggtgcggcagcggctgcgctcctgattccatggttgttttcctcctccctccgtccttatgattcaggaacttgaccttgctccgggagaacgtgcccggttcatttcagacgtccacttcggccatgccaaggcgctggcccgggagccggaggagctggctttcctgctggaggggtgcactcatctggtggtgtgcggggacctcagtgaaacccgtgaaagcccctgccaggcggaagggctggaaaaacgcgcccgtttcctgcaaatgtgccgggatgccggagtgcagcccgtgctgctggccggcaaccatgacccggatgagaaggccggactgctgaaattgcaggggggacgcgtctgcgccctgcacggtcatgccctgttcaaggaggtggccccgtggggatgggaatatttgaaaaacaagcaggcctcccgtgagctgattgccgcgttcccggaggcggatacggatttgcggcggcggctggaactggcgcgcgccatgagcgtgctggttccccccatttacacgcgttccggggcgtgccggaacaagctggtgcgttttctggcgcattccgcctggccgccggagcggcccgcgcagattcttctggcatggctgacgatgatgcggcgcatgcggaaattcacggaacgctttttcccggaagcggaagtcgtcatcttcggccatctgcaccgccgtgcggtgaccgggaaaaggggagggcggctgtacgtcaatctgggcgcctgcttccaccatgccgagtgctgggcggcggacgtgacggcggaggggggcgtctccatccgcagctatacgcctgaagggtatgacggtccggcggtggttctccgctgaccgcgtcccgcagaggaaggaaaaaagggaaggggaacgcgcccgtgtttaggcgataatgtgttagagcaccggatgactagtccatacagtttgtggacgcgttccccaaggagtttggccgcgcctgttttcccttgttgtcggagggacaatttttcccggagcatttcagggcgcagccccggcagcagcaggggcgcgaggcggaaaagaacctggagaagaaggactccgttctggcgggaacgccgccggagcattttcttccgttgtttctttccgggtttgggctgaccatgaatgaaagttagtgagatctaacttgccttgcaagaaaaaagtttgtctcacctaatatttttcaagaagaggttgacttgaccggagcttgggttattgtttttgttagttaaacctaataagcatcagtcatgatacgcaaaaactttccctccctggagctgagcaacagcctggaggattacattgaggccgtccgcaacatcgagctggaaaaagggtgcgccgccgtaggagagatcgcggaggcgctgaacgtgaaaaagccttccgtctccctggccatgaagcagttgaaggaacgcggcctggttgaatatacgcagtattcccccattgtgctgacccgggagggccgttattacgcggaccgggttatttcctgccataccatggtgaaagaattcctgatcacggtgctgaagatggaggagaagcgcgcggacgaagtggcctgcggcattgaacacatcatgacgctggaggaaatttcccggttccagctcctgacggagcattgccggaagagcggagaataggaaggcccaggacgtttttcaaagggatggttcatttccacatgaaccatccctttccttttactgcggagtgccgaccgggggcaggcagcggcgcgtgctgcgcgcgctgacgtacaccgtggaggcattgtggaggaatgcggaaagggccggggtaatcagcccgaacatgcccagcagaatcagggaggtgttgaacccgacgatgaagcggtagttgcgctctattttttcaaggacggcgcagcttagttcccttaaaaccgccagttcactcagggagctggacagcagggaaatgtccgctacttcacgggcgatgtcggaggaatccttcatggagacggagacgtccgcgcaggaaagggcgggggaatcgttgatgccgtcacccaccatgcacaccgttcttccggactgcttcaactgctggatgaagcgcgccttgtcctccggcagaacctgggagcggtattccgtgatgcccagctggcggctgatggcgcgggcggcggactcgctgtctccggtgagcatgatgatggaggaaatgccctgccgcttcagccgggcgatcgtttccctggcttccggcctgggaggatcgctgacgccgatcatgccgatcgccctgcggcctatggccaggaagatgttggatttgcccctggcgtggctgcggatagtctgccgctgttcttccgtgagggggatgccttcatcttcaaaaaggaagtggtagctgcccacgaggaccttcttcccatgcaggcgggaggagatgccgtgggccacgatgtattccacctccgcgtgctcttcctcatggtgcaggccttcctccagcgccttgcgcacgacggcccgcgccacgctgtgggggaagtgctcttccaggcaggcggccgttttcaggatgtattcccggctgcagtcgctcagggggacaatctgcgtcacctgggggcaggcggaggtcagcgtgcccgtcttgtcaaaaacgatggtgtccgccctggcgaacagctccatgaattttccgcccttgatcatgatcttgcgcgcggaagcttccttcatggcggagatgacggaaatgggcgtggcgagcttgatggcgcaggaataatccaccatcagcacggagagcgccttggagatgttccgggtgaacaggaacagcgcacccgccgtgagcagggtgaggggaacgatggaatccgcgagtttttccgcccggctctggatgcgggccttcaattcctccgaatggtcaatcagggcgatgatgttgttgatgcgggactggtcgcccatggcgtccacccggatgacgagggagcctgtttccagcgtggtcccggcgaagacgacggagccttcctgcttggctgccgcttccgattctcccgtcatggcggcctggttcacttccgcctccccggacaggacggcgccgtccacggggatgacgttgccggcgtccactcggatcttgtccccgggccggatttgttccatgggaacctggcgcatgccgtccttttccaccctccagacctggtccacgttgatgctcaggctggccgcaagcgccgcccgggtcttcttccgcgtgtaattttccagcaggtctgaaatggaaagaaggaacatgatggaattggccgttccgtaggccctggtgccgatggagacaccgatggatacggcgtccagaaccgccacattgagcctgccgctgcccaggcctgccattccgcgccggaaataggagccgtagttccagaaagccttggccattctgagagggggcggcaggaataatttgcagagcaggaaggaagaaactttcccggctatcttaagggaaaaggattggcccagtttcctggcttccgctcgttcttccggttcatggctgcggagcgtttccggcctgagcctgtccagcacgcggaaaatggtctggggattcgccccttcgtacaggatgaacacccccccgttgcagggagtggccttgacggagctgacccctttcagcttcaggagcctgcattcaatgccgcaggcctggtcatggttgaacatgccgcggccgcagcgcacccggagcctgccgggcgtatggtggataacctgatagtgcatcggtttggaaaaatgaaaaagggggaaacgcccttctccgtgcgtttcccccgttggaggctgcccgttccgccggcggagaaggaaacggactgccccagtatgatgatgaacaatgagattgttactgttccggcttgcggttttcagcggcggcctcgtgacacaagtcctgcgcttcttcacggatattggccagttgctccatggccttctgctggatgagcatggctttggaaagcccctggacggccaatttcctggtagcggggcttttaaccactttcgtgccgatggcggcggcgatgactccgccgacgaagccccagaggcccttgttgttgatgtaactcatggtaatgttttttgttgggttcagccggccttggcggcatgcagccgtttctttcccggaagggttggatgatctccaataggcctgcttttttgtaacgttccgcaggtttcaggtcaagttgaattagttccaactaatttttttacggtacgtaaaattattttaaagatttttcaatacattgatcataaaagaggtatgaaacgtgcttcatggaaggagttccaaattggaaaagggctaagggagaaaaagtgttgactcaatagttagttctatctaactttgccgcgttgcatgaacttgacccatacaggacttcaccgtttcttccgccggatttgccggtaccggaaactggccgggcttctcgtccggcgtcccagataccgcctgctctgcggggactgtgagttctgtatgggcgcatgcggcaaagccgtggatgcgcagtccgccgcaggccgggagcaggaatgctccttcgccatggaaggctgaacatccgcgattgacgaggaagactcaagatacagcattactatgaagaaacgctacatgatacccgccctgctggcctgctccggcttctgcatggccggtacggcatccgtagccactaccgtcgccgctctggctgcggaagaggctgaaggcaaaggttccattctggacgacatcgacctgttcggggacgaatacggcgatgaaagcacgcccattccgaacgatcttctgaccagggccctgacggatctgcataaaggcgcttacgagaaagccggcttccagttcctggtggagcaggcgttcctctataccaagggccaccatgcggccgcgaacgaagagactgccggttccagccagagctggtacaaattccacgcccaggccgggctgcagctgttcaaatccagccgcaaccagggaacctggatcaagagcgagctctccggctccgtggccctgaacaagcatacgcaccgcaccacgctggacgactcctggggcgcgagcggccccgccaactgcgacgtttttgaagacggctacttctacctgccggaactcctcctttcccagggtttcatggacggccagctcgtcatcatgggcggcatgatcaaccagacgaactattttgacgccaatacgtatgccaacaccaccttcggacagttcggcggcgctcccttcgtcaacaaccaggtgcttccgctgggggactccaacttcggggtcgtggggcagtaccagttcaatgaaaactggttcatccaggtgggcggcaacatgatggacaatgaaccccgccgcaacccgttccaccacacgaccggaaaatccttcaacctgcttggtgaaatcggctggacgcatgaaaaggccttcggcatcggcacgggcacgtaccgcctgcagccgttcatgttccatgcggacggcaagaaccatggaggcgtggcgttcaacctggaacaggacctgggcagcagcccgttcgccctgttcgcccgcgccggctggagcagcgccgaatcaggcaacatctgcggagcggaagcccaggcgtccgccggggtcattttcaagaaacctctggaagtcatgaccggcttgaaagaagcggacggcaacttctttggcgtaggcttctccgtgagcaagccggatgccgacacgctggcggaaacgcggcccgggcatgaccgggaaatgattctggaatgcacgtacagcttctccattacgccgtactgcctcatccagccttcctaccagtatgtgaagaatccttccgggcgggatgacgtcaactccgccaatatcttctccgtacaatgcgtcgtcacgttctaggcgggaaatgtcccgaatctgtggaagcgcaataataatcaagtcttccttgtccgtctgcatgcagagagcggaatcctgcgtgcaagggcattgaaggggtctgcatgacctggcggcaacgtcgcattctcgatcaggtagggggtgcggcgttgcttattctttatctcaaaggaagcgagaggcgcttgaaacgcctgtgttcctgaaccccgtcattccgttgtccggactggggcgctgcggaagaggcctgtacggaggaggccggcgccgtattccgcaccggttccctgcgggccgtatccgcctgacaggaggctgccagcaggcaggcggctcctatcatgatacatgtgtacttgttcatcatcttatgttgtgcggctggttgtagccgctgatggttagattagcacttcttcccatctgttgaaagttctttggtttgactaacaacaagttaggtgaattaaacacgaagaagaacgttaaggtcagcgccttgcacgctgccggatttatgacaattgatgacatttccggcgtcaggaaacatttaaaaccatgttgacttggatgggaactgtcttaaactgacagaatgagtaaggttcaatgggaaatttcaaatgatgaagtgaccgaccgtgatactgctctgcgccgcttgcaggagggaacgactggccatgtggtatgcgcccgtgacggcgcgtgcctccagtcctacaaggaagcggacggcatctaccactgtgaaatcgtgttcaagacgggctcatgctgcccgccggtattcgccgctccggaaggggtgacggggcaggagctggaaacgctgtacgaccgttttgccagcggtgacgacttctcctttgtggaaaaggaatgggagcccctgatggccgtggagtaccgccaccgccacaatgtgatgtggttcatcttcctgtttatcgcgctggtgattgcggccatggcggcgtaccagcacggctggatcggttaaggagggagcgcatgcggcatgcgcagaaggaaagaacctgcaaaccgcgggcggtctgcaggttctgaaagaaagggctgagactgggctcagtcctgtttttcttgatcgtcgtcgtgatggtggcctccgcagcaaccgccgccgctgccgcacccgtcacagttgccgcagcacttgccgcgcttgctgaacgttttatacagcgcgtaggccagggccaggaaaaggagggtggcaatgatatatgttcccatgttggtgagggggttaggagtgggtatgagggttatttggaggatgcggagggtttcttcaccaccaggtaaatgaggcccagcaggagcaatacggcgagcccctgcccgatgccgaaggaagcttccgcataaagccatgctcccatctggtaaatcaggaaggccaggcagtacgccagggcgcacatgtagccgatggcgaagaaagtccatttggcgctgttcatttcccttctgatggctcccatggcggcaaagcagggggcgcagagaaggttgaaaatcatgaaggagaaggcgctcaggaacgtgaaggctcccgcctggaccaggcggtccccggtttccctgatttcagcgtcttcatcttcctcctcttcagcggcggcttcctcggcggcagcttcttcagaggcgccctccagggatgcctggagctcctggccggcgggggacatttcctgcgtttcggcgggttcttcctccgcctcttccccggaactgccgtccgcatacaggacgccgaaggtgccgaccacgttttccttggcaatcagtccggtgatggtggccatggtaggtttccattcgccccagcccagcggctggaagacgggtgcggccacgttgccgatggaagccagcatgctgtcattctgctccacggaatcaaccttccagttgtagctggaaaggaaccagatcagggcgctggaaacgaagataaccgtcccggctttttgcacgaaggccttgcagcgttcccacgcgtggatgatgacgttcttccaggcgggaacgtggtaaatgggaagttccatgacgaagggggtgggatccccggagaacatggcggtctttttcagaatgaggccggaaaggatgatggcgcccaccccgatgaagtaggctcccggggccacccaggaattttccgggaagaaggcgcctgcaatcagggcgatgatgggcgttttagctccgcatggaatgaacgtggtggtcatgatggtcatgcgcctgtccttttcattctcaatggtgcgggtggccatgatgcccggaacgccgcagcccatggaaacgagcatggggatgaaggacttcccggaaaggccgaatttgcggaaaatgcggtccatgatgaaggccacgcgggccatgtagccgcaatcttccagaatacccaggcacaggaacagcaccgccatctgcggcaggaagcctaggacggcccccacgccggcaatcacgccgtcctgaatcaggctttccagccacggggcgcagttggcgctttccagcaggccgcccacccattccggaacccattccccgaagaaggtgtcattggcccagtccgttccccatgcgcccaccgtctggatggaaatgtaatacaccgcccacatgacgacggcaaagatggggaggcccagccagcggttggtgatgatgcggtcgatcctgtcgctgcccgtcaggctgccgatgccggccttgacgacggaatccgcggtaatgcgtgaaatggaattgtagcgctcgttggtgatgatggattcgctgtcgtcatccatctcctgttccatggcttcaatgatcccgttgatgcgggactgctcctcagaggtgagcgcgagctggtccgcgactttctggtccctttcaaaaaccttgacggcaaaccattttttctgctggtccaggcatttgccggtgattatttcccctatttccccgatggctttttccagacggtccgggaagtgcacggcgcgcggggcccgggcatcctccgaggtggccgtttttacgacggcgtccaccagttcacggattccggtccctttcagggcgctgatttccagcacctggcagccgagatcccgggaaagcttttccgtgtcaatgcggtcgccgcgcttccggacaatgtccatcatgttcagggcgatgatgacgggaacgcccagctcgcaaagctgggtggtgaggtaaagattgcgttccaggttgctgccgtcaaccaggttcaggatgagggagggatggtccgtgaccaggtaattccggctgacgacttcctccagggtgtagggggaaagagaataaatgcccggaaggtcttcaatgatgatgttcttgtggcctttcaggcggccttcctttttttccacagtaacgccgggccagttcccgacgtactggctggcgcctgtcagggcgttgaagagagtggtttttccgcagttgggattgcccgccagggcgatggtaatgttgctcatggatgtttccttgtcttgatgtatgggtgcgccgtcttgctgtcaggtcaggaaacgtgcggtaataagggcggaatcaatggatatggatgttctcggcttccgatttgcggatggagagttcgtagccgcggacagtaacttcaatgggatctcccaagggggcgactttgcggatgaaaatctgcgttcccttggtgactcccatgtccatgatgcgccttctgaccgggccttcccccgccagtttcccgacggtcacggtttccccgatcagggcgtctcttaatgtacggtgtttggtcatagaatgatggctgattgttggatgagaaggttcaggccacgaatatcttgcacgcaagagccttgctgagagctatccgggaccccttgacattgacgatgaagtttccgccgttttcagaaacgatggaaaccgtgctgccggcaacgaagcccaggctttccagaaaacgccgggtttcatccctgccatgaattttgttaacctggcgaatatcgccgatgttgagcatggagagtggcatggtgtgtgtatgaatcaaatccgggagaaagttagtttcatcaaactagtaagtcaatgatattatgcgcctgtgttttcaatttggataaaaattattcatcatgaatcatttacccattagtctaatctaagtatgacgcggaggaaaagccggaaacgggggttttccggaaataagccggaagggggaatacaaaaaagccgcgccatgaaggttcatggcgcggctggaaaaaatgctttcctctggctcaggaggcggggcagacttcgccctggacgggcttgccgttgtattccccggtcagggttttcaggaaggccaccagcaggctcacctccttcttgtccaatttgtcgtagccgagctggtagtggtacatcttggtgatggcttcctccagcgtctgggcggaggcgtcatgcatgtacggccaggtaagctccacgttgcggagggtgggaacgcggaacctgtgcctgtctgattccttcttggaaaagttcatcaggccgttgtcgtcattggtcttggcgcgtccggcaaagaagtctcccttgaggtcggcgtattcaaaggactggccgcccatggcggggccggtgtggcaggtctggcaaccgagcttgaggaagagcctgtagcccttcttggcattctcgctgatggcgttttcatcacccttcaaataacggtcgaacgggctgttcggcgtgatgagggtcttttcatattccgcgatggcgtttgtgatggtttctccgttgaagccctggggataaaccttcctgaattccgcggcaaacacggtgtcctggttcagcttggcggcgatctggttccagtcgtccggatgttcgtaacccatttccaccgggttcaggggaggtccgcccgcctgttcctggaggttggcggcgcgtccgtcccagaactgcttggtgtggaaggcggcgttgaagacggtgggggcgttgatgccgcccttctggccgcggactccggtggaggtggccaggttgtccgtgccggccttctccagggagtggcaggaagcgcaggaaacggtattgtctgtggagaggcgcacgtcatggaacagcttgtagcccagggccaccttggccggatccgtgggaagggcgtctggaatgggggagatggcggtgatggcgtactccttgcccaccatgtcgccgaagattttcaggcgttcatccttgacccactggagcatggctgctttttccggaagggtgagcgtgctgccccagtgcaccatggtgtaggaggtgggtggcatggaattgatctggagcacgtgttccagtttggaaagggtcacggcagtgggcggttcatccatgttgtagctacgctgtccgtcccggatgtggcgcgccagcaggccgccggaaagggtgttcaccaattcggaaatgtgggtgccgggcttatggcagtccgcacacttggagttcatggtatgtgcggtgatttccgccgcctgggcggatgtcaggggcttgatattctggttcggcaggaacaggggcgcgactgccgccgtcacgatgaccgtgccgcccagaatggccccggccgtgatgaaggaacgtgttttgctcatgagattctcaatgacgtggaattgcctgtatggtaaaagggaagggttaatatatcaagatttattctaaagttcgccggcctttctcaaatcttcgttaatggcctccagcacgtccgcttccggggtgaaattggcggcatggtaggagctgcggaccagcggcccggacgccacgtgcctgaagcccttggctcgcgcgacctcctcataacggacgaagtcgtccggatggatgtatttgaccaccggcaggtggttgcgggaggggcgcaggtactgccccagcgtcagcaccgtgacgccgtgctccagcaggtcgtccatggaccggaaaagctcgtcttccgtctctcccaggcccagcatgatgccgcttttggtggaaaccttgccgtctacgcagtccagcgccatccggaggacgcgcagggagcgctggtactgggcgcggaagcgcacgatgggcgtcaggcgttccaccgtttccagattgtggccgaagatgtgggggcgtgccgccatcagcgtccggatggaggagggcttctcattcaggtccgaggccagcacctcaatgatggtggagggactggcttttctgacggcccggattacttgggcgaagtgggcggcggctccgtccggaaggtcgtcccgggtgaccatggtaatgacggcgtggcgcagcttcatgtgcacgacggcgtccgccacgtgctgcggctcctccgggtccagcggaaagggcttggcggtttttacggcgcaataggcgcaggcgcgcgtgcaccgctccccggcgatcatgaaagtggccgtgccctggttccagcattcgtagcggttggggcagtgggcttcttcacagacggtgaacaggtgcttgccttccacaagctgcttgacgtcccagaattcccggccgttgggcaggcgcaccttgatccaggacggcttgcgttccgtcccttccgcagtctcgttgtcgttccggtgttccatagccccgctagcttgccgtgagtccgctgctttggcaaatgcaaagtgctttattcggggccgtcttccccgttttcatccgggattgcgggggagtccgcagccagcttcttccgttctttggccgccagccgcgccgcacggaaaaattcctggaggtggtgcaggcattcgtcccccagaacgccgggacgcacctcgcacttgtggttgaggggagggttggaatccagcaggttgatccagcctcccgcggctccggtcctggcgtccggacagccgaagaccacccggtccgggcggcagtggacgatggcccccgcgcacatggggcacggttccttggtgacgtacagggtgcagccttccagccgccagtcgcccagcgcctcctgggctgccgtcagggcgatcatctccgcatgggccgtggcgtccttgagggcctccacctggttccagccccggccgatcacgcggccgtctttcaccacgatggccccgatgggcacctcccccttcaccagggcttttctggattctttcatggcttggcgcatgaaccattcgtccgaaccgggcatttccatcatcacggcgcctatcatggactggacggcgcatccctggcaagccctttctggaggatatttattgtattttatacaagaagttcggcatgccgcggaaagggatgggtgtgaatgcgtttttgcgttgattccagggggtgcgtggcataagtatgaaccatgagcttttcagaaccctgcacattggccgtggacttcggcggtacgagcatcaaaatgggcgtgacggcgggggaccgtattctggcgacagcggaccgcattcccaccgccatgtttgaaagtccccaggcgattattgaggccatgattgcggcggccctgaacctgcgcgggcaattcccgtccgcctgcgtgatgggcatggggatgccgggatggtgcgattactacagggggactctttaccagcttaccaatgtccgggtatgggaccatgaagttccggtgaaggagctgatggagcaggcgctgggcctccccgtcgtgctggacaatgacgccaactgcatggcgtatgcggaatggaagctgggcgccgggcgcggcatgtccagcctggtgtgcctgaccatggggacgggcattggcggcggcattgtggtgaatgaccgcatcctccgggggaaacggctttccaccggggagctgggccagacgagcatccattaccagggcaagcccggcccgttcggcaaccggggagccattgaagaatacatcggcaacaacgaactggcggcggaggcggtcaaacggtatgccggggcgggaatcgtcaaaaccgtgaacgaatgcacgcccagggacctggacgaagccgcccgcgcgggctgtcccatcgccctccagctatgggaggacacggcggaaatgctggcctgtctcatcatgaacctgatgtacacgctggtgccggacgccttcatcattggcgggggggtagccaaggccggagacctgctcatgaagcccctgctgaagaacctcagggagcaattgttccccatgcacatggaggagctgaaaatcctgcccgccagatttggcgcggaagcggggctgctgggcgccggcgccatggcgatggacgaattcctggggcagggagttctggaacgttttaagaaagaagaagtagcaaaagctctttgttagattgaactaacatagggcttgccatagcgtagacgcaggcgtacaagcggaacaggtcatgagtacggaacatccccacgaacatttttcacaaggagcttcctgctgcgccggagggtgctgttcaggaagctgctgcggctccggagacgccatcaggcccgttcccgccgtgctgggcatcgctctgtttgtcgccgccctggtgatgggaagcgattcctggagcggcatggctgcatatgcggcggcctacctgctgataggctgggatgtattgaaggcggcttttctggggttgaggcacgggcgtgccatggatgaaaatttcctgatgagcattgcctccctgggagcgatgttcctgggggattattccgaagccgtcggggtgatgcttttctaccgcgtgggagaatatctccaggagcgcgcggtgggcagttcccgccggtccgtgagcgaactgatgaacctgaggcctgaatccgtccatgtgagagagggcggcactgtccgtgacgttcctcccgcggaggtccggcccggttccgtgattgaagtgcgccccggagagcgtgtcccgctggacggcacggtgacggaagggaattccgtcctggatacctccgccatgaccggtgaatcccttccggtggaggccggggccggaagcaccgtgctggccgggtacatcaacggacagggcgtgctggaggtgcgcacggaccgggactggcggcattccgccctggcgagggtccaggaactggtggaagccgcttccggccataaatcccccctggaaggaaggctgtccacgttttcacgcatctatacgccgctggtgatctccattgccgttctggtgttcctgctttatcccttcgtcacgggcggaagctggacggacggcctgttccgcgcgctggtgctgctggtgatctcctgcccctgtgcgctggtgctgtccatcccgctgggcttctttgccgggatagggcgggcggcgcggcagggaattctgctgaaagggagcaactacctggatgccctgcggaaagtgaagacggtggtgtttgacaagaccggaaccttgacggagggcgtcttttccgtggatgaagtgcttccacgtgacggagtaacgccggaggaattgctgtactgggcggcgcacgcggaaagctccgcctcccacccgctggggcgttccatcgtaaaggcgtatgaaggcagcctgttcccggaccgtgtggcggagctggtggaagtaacggggggcggcgtttccgcccgtgtggaagggaaggctgtgctggtggggaaaaaggcttttctccaggaggcgggagtagaggcaggggaggaagaggatcgcggcgtaaccatttacgtggctctggacggcgttccgctgggacgtttgcgtctgtctgaccggatcaagccgggggcggaacaggcggtgcgggaattgagggggctgggcgtttccaacctggtgatgctgacgggggattcctcctccgccggtgcggaggtggggcgcaagctggggctggacgaggtgttcagcgggctgatgccggccggcaagctggagcacgtgcgccggctgaagccggaagaaggcctgctcgcctttgtgggggacggcatgaatgacgctccttccctggctgccgcggacatcggcatagccatgggcggcgtagggtctgatacggctctccaggctgcggacgtggtggtgatgaaaggagaccccgttgccgttccgcagggaatggttctgtcacgggcgacggagcgcattatcgtgcagaacattgttctcatcctgggcgtcaaactgctggtgatggtgctgggtattctggggctggccggtatgtgggccgccgtcatggcggatgtaggcgtctgcctgcttgcggtgggcaactccatgcgtattttccgggtacaactggacgcgtgacggaggagaatccgttcactccacccccttgttccgggcggagcggctcccggcaaacatgctatccatgctatccatgatgtccatgatgtccatgatgtccatgatgtccatgatgtccatgatgtccatgatgtccatgatgtccatgatgtccatgatgtccatgatattgccgcggaatccggaaatgacggggaacatctccataaaaaacctccgtcccggcgagggaacggaggcggtaaagacggaaaaagggaggtgaaccttaacgcagccctgtcagcaggagttccgcattgttctgtgtcttggagatattttgcaggagggcctggaggccttcccagcccggcttcatggcgagctggcggcgaagctgcatgatcttgacgaactcctgttcgttgtacagcctgtcgtcattgcgggtgccgctctgggaaagggagatggccggataaatgcgccgttcggaaagctcccggtccagccggatttccaaattgcccgttcccttgaattcttcaaaaatcacttcatccattctggactccgtatccaccaagcacgtggcgatgatggtcaggctgccgccttcctccacgttgcgcgcggcggaaaagaacttgcgcggtttttccagcgcattggaacccaggccgccggacatgatgcgtccccccgtctggttggcgttgtagccgcgggccagccgggtaagggagtccagcaggatgacgacgtccttgcccatttccaccagccgcttggctctctcaatgaccaggtcggaaacctgggcgtggcggcgggaaggctcgtcaaaggtggaggcgtacaccggagcatccacggtttcttcaaaatccgttacttcctccgggcgttcgtccagcagcagcacgatcaattccacttccggataattggccctgatggaacgggcgattgttttcagaagaacggttttgccgccgcgcgggggcgccacgatcaggccgcgctggcctttgccgaagggggtcatgaggtccagcacgcgcatggcggcggaattgacctccttgttttccagaaggaggcgttccttcgggaagaggggggtgaggcgttcaaagtcactgcgcgcccggtactcttctgcggggatgccttccacgctgatgacggaagaggcggaaaggtacttgtcatggggacgcagcttgcgcagcctgaccttgatctgctggcctacgcggaggtgcaggggcttaatgaggttgccgcccaggtaaatatcatccggagaggtgcggaagcttttgaccggatccctcagcatggcgtaattgtccttggcctgttccatgactccggagacgactacttcatggccctttgccagaagctgctttcccagctcaaaaatcagttgggacttggtgagggaggccgcgttccggatagggaggctttccgccatctcctgaagatcgttcagggggcgttcccgcagttcattgatgtcaatctgttccggaacgggagcggaggcttcctccgaccgggccgggactgccggagcgcaggccgtatcccctgcgttttcctccggagcggcagccggatgttcctcagaaatcccttccggtgcgggaaggggcttggggggagccgcctgcggatcctctccggaggggaggggcttgttgtcgagttcttcagtcatgaaaaaaatgttggtagagtctttggatttgctggcggagcaggtccggcggtccttcgttccagaggacgaaatcggccgcggccactttttccatgataggacgctgggccgccagaatggcttcaatcatgtcctcacggaatccgttcctgagagccaggcgggtcttctgcgtttcccgggaaacggccaccacgcacacggcatcctggtggtagcgcgccgatgtttcaaaaaacaggggcacgtcaatgacaaacccggctaccgccgcattctgacgtgccgcccgcatttgcgcaagacattcttggtgcagcagggggtgaatgattccttccagcgtcctgcggctttccggattccggaagacaagctcccgcaggaagttcctgtccgcgcggccgtcttcatccacgctggcgggtccgaaggcgctggagagcctctccctaagcctgccgccgtccagcagcctgcctgcctccgcatcacagtcaaaaaggcgcaggcgcggcccccccttctccatcagcaggcggatggcggtggactttccggtggcgattccgccggtcacgatcagcgtcttcatgagggaagggaaaaaccgggtatgtatgggacataaagagcgggtgaaaggttcaccctttcacccgctccaatatggacgttatgcacgccgcctacatgggaggcagcaggccttcggaagcaggcagtgcgctttccggagcggccgcggtgggaagggcgttgccgcgtacgggctggcccgtggcgtcaatgatctgtcccgtcacgaagatcatcagattcttcttgatgtggttgtcggagttgctgcggaagaagcgtccgatgagaggcaggtcaccgaagatcggcaccttgtcttccaccgtctgcacgttttccgtgatcaaaccaccgattgccacggtgtggccgtcgtagatgaacagggacgtttcaacggaacgcttggagaagatgggctgctcaatgcggttttccgtcagagtcagggacatcggcttgccgtcggaaccaacgccggtggactggatcgggctgccgtagttcacgaagccttcaaattccacgatgctgggcttgaagttgaggtcaatgatgtacttgttgtcaccaatggtgggcacaacttccagggtcacgccgacgggcttcatttcaaacacgccgggagtggcgggagtgacggggaagctggtgacctgggcctggttttcggtgcctacaaggtcatccagaacgttgttccggttattgtagttgccgccgccccagctgctcacgttgttgggaagttccgggggttcgtattcggtggggtaccagaattcgcggatgatttcaatcttggcggtttcaccggacttggcggtcacgctgggagcggtgagaacgtcggaacccttcttctgggacaggccgcgcatcagcatctggaaggcgccttcgtcatagatgcccgtcagggacatgatgccgggagccggattcttcttggtggcttcagtgcggttggtgctgttcagcaggttgtccacggagttcttggcaatggcgtagtcgcccgtgcggttgccgccggtggcgaggccgttgatcaggccgttgccgtccgtattggtgctgttgttgttcacgggccagtcgcttacgccgccaggggactgggtgaagtcatcaggaacgaggccggtgccgtagttcgtgccgccgcccaggaaggtgctgcggtcgttgctgacggagaacggcgtaacgatccagtcaaagccgagttcttccgtgttttcctgggtcacttccacgaacttggtcatgatgcgcacctgctgggattcgccgcgggtgttttcaatgagctgttcgatcaggtccaggttgccggaggtattgcggacgaccagggaggagttgccgttgacaaggaatgccgtggcgccttccgggaagctgatgccgctcttttgcagcaggctgcggatggagggcatgggcttgaggccggaggagctttcaccgccgccgccgaaggggtcttcgctgacgtcgccgccgccgtcgccgacggtggtgcggagagcggactggaagcccggaggcacggagaaggtgcgctggtagagatccacgtcattgccgccggcaggaaggatggtgacggcatagtcttccaccttctggcgcaggccggcgttgctgcagatgaagcggagcacttccagcatgggaacgttggtcagcttgagctggccgatcttgcgggtgcggatgctttcctgcggagcggcaaccggagcgacttccgtgacgtccgttgattcctcgccgaagccgccgtcgtcagctgcgggagctgtcggagtaacggctgcgggctgggagtcgttgataacaaagttgatgccgcgttcgccgttcgggcctaccgtacggtccagttcgatggacttcttgcgcaggtagtcgatggcgtcttccacggtggtgtcttcaaaggagacggaggggatgatgatgctcttgagcttcatcaggttggccgtggcgccgttgacatccgtgatcggggcgttgtccgctccgtcggctcccgtcgggacttccatcggaatggggcgttcccacattttgtctacttccgcaagcatggtgctgcgggtctcgtcgtaggcggccgcataataggccattctgcggcggttgaccgtttcctgtccgcggcgggctgccacgttgtacgggtcaatggaaagaaccttgttgaattcggcgatggctttgtcgtagtcgccgaggtcatagtaaccataggccatgtgaaggagggtgttcaccttttccacgttcttgacgtgttcgggtgtaagcgccggattcgtgcgaatcgggtccttcatgtattcgagcgtctgcttggcaagcttggcgctccggggattgagcttgatggcgtcctggagaagcttgtcggcttcgtcatagcggcccactttgatgtattcctgagcaacggcgatgctggcgtcgccaatgtggttggcgatggcttccttgcgctggtcgttgatcggcgcggagggcagcatgttgtaagcggcattgtatttgtccagggcttccttgtacttgccttcgcggtacaggttgcggccttctgcaaggagctgcatggcttcctgggtctgcgcttcgcggcgggccatggctatgcgcgctgcatcggactggtagtaactgcccggtccggcgtaggacgatcccaaggcactggaggttccgacggcgccgccatcaccagcctgcgcaaacgggcaggaggcagcaatggccatcagcgcgatcagggaacgcttcggttgataaagtggtgcgtggtccatagttaggttcttctttttacatgtttttcggatttgtgaagcttttttttcagaaaagtttaaatccgggtctattttttcttgctcagtgttgtttgttctccagtggttttgttggcaatggttacggtctgcgtagcattatcaacggttttcagcgtataggtctgtttggtgtctcccgggatctggaagtcggcgccttcctccacttcaaagctggtatcccgttcggggccggcggcgatagtaaggtttactttcttatcaatgattggaatgacgtattttgtgccgcgcctgatggtgtaggtttggccgtttttggtcggctttaaatccttgacgacggcttcctcgtccgtttccaccatgtccaggctggggttcttgaattccttgctggcgacgctgacaagctcgaacctgggttcgtctttcgtgttcttgcgggtgccgaacttgccgttgggctggacaatgtttctccaaagctcctgcctggcgcggttcatgcccttgaaggtgaagtcattgccgtccgactgcgtgaaggccaggtaaaagccgaactgcttgatttcgtccacaaagagcttgttgacgaggggtgggtggctgttcggatcattgggatgcgttttagcctcatattcctcctgtacggtgaatccgtcgttgtcagggtcccgggtgaggacgtccgagtaaacgaactcattttccagaccgttgtccaggaaccatttgttcgggatgttgccgtggatgggaggtcctgaaataatgtcaaagggttccattcccccttccttgatccagagattgggagctacgaagcccacgtactgctgcgtttcctgcgcaatgggcttgagctcatgggaggcggaaagctcctgattgacttccgcggctttcttgatgccgggaggaggttcaatcgccttttccgaaacctgcgtggtgaacttgtacttgtcattcagtcccagaagggtcaccgtaccatagacggctacccccaggcccaggacgatgccggaggccagcaggattttgtcgtagttttgtttttcagacatgttgaaagtatttgctgcggttggttgccgtaattaatcttcagacggttcctgtgccttgggctggttgaagtggaccaggttgagggagacctggacaaagatttgctccttgcccatgtaaggtttgatgagttgctggatggccggtgctgcgggcgcagccgcttcatcagccggcgtcagggatgccgctcccgcagcgggctgggcggcggcaggtttggccgctgccggattggcgatggggggaggcatcatacgctcgttgcggatccggatggaattaaccgtgaacaggtaatcctgggagtccgtaatagcgttcatggctttcagcacgctttcccggttgccctggaaggcgatttccaggggcatgggagtccagggtgcctggttgggctcgtcagcgtcctcttccggattgttcgccggattttcaatggggagctggggacggtacaccttgatgaatttggacagtccgcagtccgtcagcttgttgacgaggctgttgacggctttcaattcaaagcccagcgtggaggccgcctgcacggacggagcctgggtgctgtaaacctggaagccaagccaggaggaagtgtccgtgatcaggatgttctttttcttgcaggaggcgatcagggcgtccctgaacgttttcagttcattctggaatgccgtgggcgtggtgggaaccagcgcggaggaagcaaggaagggcttgtatgccgtttccaggctggtgaccgccttagcatagcggttcagttccttttccagctcctcattggatgcgcggctcggcgtgatttcagcggcgttggcggatttgatctccttggaggcgacgctgattttcttgtccagctcgctgcgtttggaattgacgatgtacccagttacggataaccccaggaataagagaagccccacgcccgccaccatggcggcgggcttgttgtctgtaatccaattgctcataaaatatgtcttgttcgggttgggtaatcttatttgttaaagttcacgggaatgggagtttttaacggaagcaccagcttgaaggggacaaaggcccctgccgctgcgtctaccttggcgtccttggctcccagctccatgatctggcgggcttccagctttacgtctccgggcttgaaggtgaacagggattccttgttcccgtctatttttgcctgaaggtcctggatgattctctggccgcccagactgcgccggacaaacccggtcaggcgcacggcgttaacgctgtaaacggacggttcatcttcactggaggtgttcgcggaggattccatcctgatgtcgtccaccagggacgtgtttttatccgacgtgaaggaatccttgataacggagtagcctgtgatctgggtggtatcctccggattgaagtgggccagcggttcgaagtccgtgaaccagtagggataatccttgtgttccgactgttccagcaggtgcttgatgatgtccgcatatccgtagcgctgtagtgtgagctgttggtaggaggccagggtggcgtccagttttttcagctcctgttccttctggcgcagggcggattgctccgacttgatggaggtgacggtggggtgcacgccggcgagggtttcctccgccttctgcacgcccatatatccggtgacggcataggctgcggcgccgagaacggcgatggcggctccggcgatgatggcgggcatcttcttctggttggcgcgctttttggcaattgccgtgggttccaggtcaatgttgagggaagccctgccgatggcgttgacggcggtgccgatcaggccgcccaggataaaggcttcacgggagatggtgttcacgtccacgccggaacccacgcccacgttgtgcatggggttgaagaaggaaatcggaatgcccagcttgtcttccaggaattccttggtgtagggcagggacgcgccgccgccgcacaggtaggccttcacgggagcgcttccgttcatctgggcgcggtaatggttggtggtgcgctggatttcggaagccagcctggtcatggccgtgcggatgacggtagccaggttggccgtggcgggatccagcccctccgtctgtccgttgctcatggaaacgaggccgctggtggtcttcaggcgttccgcctccatgaagggaacgttgaattcccgggcgatggcggaagtgacgaagatgccgcccgcggaaatgctgcgggtgaagaagcggccctgttcgctgtaaatcaggtccgtggacttggcgccgatgtcgatgagcatcaccggctctttttcatccgggtagctgtccacatacgcgttgtacagggaggtcagcgcgcagtccaccttgccggtggaaaggttgtgggagacgatttcgtcattaagggaatccagatcttccgccttgatggctacaaggacggcttcccgttccaggcccttggcggggaggaggtggtagtcccacaccacttcatccagcgggaaggggacgtgctgctgggcttcaaagcggatgagctgttccacatcggtatcgtccagggccggaagcttgacgaagcggatgaaaacggattgcccggaaacggaatagttggcaacgctgcctttgacattgagttcctggacgaggtcggcgattgcctcccctattttcgtcaggcgcaagccttccgccgacgggtccagcactacgaggcgcgtagcatagcggtccaggataagggcgtctttggaggtcttggaaaagacgcccattgaaactctctgggaacctacgtttaatgcgacgatttgtcgtgaattagccatgggtgatttctgttaaataaaaaatgagatgagaaaaatgttgatggggctttattcgccgtccgcagccggagcttccgtgggcgtgccgaacggggccgggctgggagccgcctgctggctgttgggcctcatgatttccggataacggtcataccagtacacggagaagggcgtttcatccttgttcaggaggggataataggaggtttccacgatgctgggggactggatggtccaccatttttccatcttgccgcgttcggaggaataagtggcgacgattttgccattgtattccaccaccacgccctggtacttcacccacttgcccctgccgccttccgaaccggtgatgcgcttgacggaagaaggggagagatagacggaggcatacgtggcttcccctaccggaacattgacgtattttacttccttgtacagtttcaggtactggcgggcacggtccgggttgactacggcaatatagaatttgaacgtcagggaatcaatgtagccggacttgggcacgggagcggcttccaccttgaagggcatttcaaaatccgcccatctcttcggcttcgggagcggccgggggtcgtcctgggtcatgacattgggggactggcgcatgtacagggacagcttttccaacgtgaccttcacctgcattctgggattgctggtggtttgcgccgatgccgcaggaatgaaaagcaccgcagccagcatggccgtgatagtgttaaggatggatttcatagcacaattcgattccctgattagttacaccaaaaaccgaactgtggctagcaaaaatctcttgtttctttccatgtaacgggtgttgcgcaggatgaggctcaatccggaggttccccccgtgcggtcaagaaaaaatcatgcggcatggctgcgggcttgacctggaaggggtgttttcacatgctcggcccatggcgattgattcggatctgctgaaaaagttttcagaagcccacggtatttcagggcatgaggatgaagtacggaaccttgtggcgcaggaacttgaaggatgcggggaattttcctccgacggttcgggaagcctgttctgcaccaatggcgattcaggcccccgcgtgatgctggccgcccacatggatgaaatcgggttcctggtacagaacatcacggcaaacggctttcttcaactggtggggataggcggctggtggccgcataccctgttgagccagcgtgttctggtgaaaacgcgttcaggccgcagcgttcagggggtgatcggttccaagcctccccattttctgccggaaggccagcgcaacagcgtcatgagcatggaagccctgtttgtggacgtgggcgctgaaagcgcggaacaggtgaaaaatgaattcggcattcatctgggtgatcccgtggtgccggacgcggcattctcgcctctggaaaatccgttccgggtcatgggcaaggcctttgacaaccgtgccggcctttccgtgatgatagaggccttcaagacattgtgccgggaaggacaccccaatacactgattgccgccgccacggtgcaggaggaagtggggacgcgtggcgcgaagacggccggagtcgccatgcgcccggattgcgtgatcgtgctggaaggcccccccgcggacgatacccccggttttaccgtggcggattcccagggtgccctgggcggcggcgtgcagatcaggttgtttgaccctacggccatcaccaatccccgtctggccgccctggccgagaaaacggcggcggatgcaggcatccccttccagctgacggtgcgccgttccggtggaacggatgcggcggcccttcatctctccggcaggggagttcccacgatcgtgctgggaatacccacccggtacattcatgcccataacggcgtgctggacctgcgggactaccgcgcggcggtggaactgacggtggcgctggtgcgcgccctggaccgtgaagccgtggaagcccttacccattatctgccctgaaaggaacgcccatgaatttgaccgcttacgtacacgacctggaccccgtcatctggcaggtgacggactccattgccctgcgctggtatggcgtggcctacctgatgggtttcatcggcggatactttctgctctcctggctgtcccgccggaagctgtatcccattccgcaggacaggctggcggactttgtcacctatgtggcgatcttcggcgtcctgatcggcggacggctgggatacgtgctcttttaccagatacccaaccacggctggtcccagttcctggcggacccgctcatggccctgcgggtatgggaagggggcatggccagccacggaggaatgatcggcgtggggctgtacacgttctactacgcgtggaagcaccgcgtcaagtgggtggccctgctggacgggctggccattgtggcccccgtagggctcttcttcgggcgcatggccaacttcatcaatggggaactgtacgggcgcattgtatcgcccggatccgcccagggaatgatctttccggcggaactgtcccaggacccggacttgttcgtccgcgtggcctcccgcatctatgaaacgcccggattgctggacaagctttccctctccggaataaccgtgccggaccgcatgactgccgcctgggtgaccgaccgggtgagggatacgcccgccatcaaggaaatcgtggggcagatgatgcaggaccatgcgcgctatccttcccagttgtatgaagcatttgcggaaggagtgcttctctttgccgttctgtggttcatccgggtgaaattcccgcgtgcctggaatggcgtgttctgcggcatctttgccattctctatgctgtcgggagaatcgtttgcgaggaataccgggaaccggactcccccttctccatgggattgacccgcgggcagttcctctccgtcttcctcgtgctggtgggcgtcgccttcttcgtctatgcctttaaaaccaggcagacggtgcaggaatgcaccttctatgatcctgaaaaaaagaacaaggaggaatcagccggaaaagccgcttaaaacgggtccaggtcaacttcccccgtcttgggaatataactggaaggtccgcccttgaaaatggcggaaattccgctggcgaaaagctgcaaattctgctggtcaaaggcgaagcgctcgaactccttcacggaaaacagcgtgatggggtccgtattgtaggccttgaactccatgatgctggtgcccgtgcgcatgtctgacaggcgcccttcaatgcctacgtccccgctcatgaaattgccgaggatcagggaagtgcccggaaggggggacgccagggaaaccaggtcggacatgatattgccgcctacgtccgtaggcttcagcttgaccatggcgatgtaaagagtcacgccgcccggtgcggggcggtcaaccagctgccacttgatccttcctccggtctgtttggatttattctccagcaccctgcggatatctttctgaagctccgtcctgaactgttccgccagggccggggcctccttcgggaatctggccttgatataatcaatattgatgggggccacatacaccttcaggcgcggggaattccagatggcctgctctgtggggttgtaccagacgccctggaagcagctctgtttggaatccgcatgaagaggatgggtaatcaagggggaaacgggcatgtgctgggaactggaacaggaaaaaaccaatcccgttcccagcgccagcaggagccgtgaaatagcaccgtacatgcaggataagacggcgcccgcatgtccggtgttcgagtcatgacccgattgtcatcaagagttttccccgccggggggaaatcaggaatgggaagggtcctcctccagaatttccgcaatctgccgggcaaaacggtccaggttgtacttgtcgcaggcgaactcctcaaaactgttgcaggaaaaaatattgatgggatccctgttgcgcccgtaaaattccttcaagatcgtcccgttgtccagggaaacgatgttgccttcaatccctaccgctccagaggcgaaatgattgataatgaaggaaacgcccggaatcggcgagacgattcccacgcccagggccacgacttttcccccaacgtccgtgggctttaattggacgatcgccagggaaaccttcacgccgggcgtgcgcgggcggtcgctcagcacccagcggacatgattgccgggcttctcattattgcggtcaatcaagaggcgaacctccttttgcagggaatcccggaattcgcgcgccaggtagggggaagcctccgggaactgctgccggatggagctgatttccacgggggcgatgtaaacgtactgccgcctttgctgtttccagaggaattgcccggcggagggatggcaccagacgccgccgaggctgccgcgcgcctccttcagctccgcagcatgagtaatgagcggggaaacgggccggtaaggaccggcggagcaggaaacgcccgtgaaaagaatagctgcggcggaaaaaacagcacggaaaagcataaagcccagaatgaacaaaagaatgccgggccgcaagaacttaatatgaaccgcaggaaggccgttttgtgtccggatgcatgattgacaagctggaaaagcggggcatgctgtcggtatgagatacgagccgctaccttcctccttttttgccggcaatcgtgcggaactggcttcccgcctgcccgccggcagtatgctgatcctgcatgccaacgacgtgttccccacgaatgcggacggcaccttcgccctgcaccagaatgccaacctcttttacctcaccgggattgaccaggaggaaaccgtcctcatcatgaccatccgggaggacggctgggatgaaatcctgctgttgcgtgaaacgaatgaacagatcgccatctgggaaggagcccgtctcacgcaggatcaggcgagggaattgagcggcatccgggacgtgcgttggaccaatgaatatgatacgctgctggataccctggttccggtcgccaccatggtctttgtggaagccaaccagcatccgcgctgcacctgcccggtggaaacgcgcaatgcccgcatgaccaaggaactgaaggaaaaattcccggatgcggttctgaaaaacgtttatgaaatcatggcggagatgcgccagatcaaaaagccggaggaaatcaaggcgctcaggaaggcttgtgacattaccaatgaaggcttccgggcgctgctccggttcatcaggccgggggtgggggaatggcagatcgagggctttctggctaacgaattcatcagccgggggccgcgcaaattctccttccttcctatcattgcctccggaaaggacacctgcgtgctgcactacatccagaacgacaagaggtgcgaggacggcggcctggtgctcatggacataggcacggaatacggaaactacaactccgacatgacccgcaccgttcccgtgaacggaaaattcaccccacgccagcgcgccgtgtatgaaagcgtgctgaacatgatgacctatgccaaaagcatcctgaggcccggcatcttgaaatcggaatatgagcgcctggtgcgcgtcttcgctgccggagaactcgtcaagctggggcttgtcacgcccgcgcaggtggcggaaaaaccgtccgatcctcccatcgtgcggaaatactacatgcacggctgctcccacttcctggggctggacgtgcacgacgtgggggaaaccaaccccgtcgtgctgccgggcatggtcttcaccattgagccgggcatctacatagcggaggaaggcatcggcatccgcctggaaaacgacatcctgatcggggaaaaggaaaacattgacctgttgggggacgtgccgctgctgcctgatgacattgaacggctcatggcccggtaaaatgggccggattcggttctaaacttgacaatgaggcccgcgtgggttttcattcccgtcccatcatgtcgaagaaactcaaaatagcacttcccaaaggcagtttgcaggactccaccgtggaattgttccgcaaggccggctacaatgtatacgtgtccagccgcgggtaccgcccgacctgtgacgacgacgatctggaactcttcctgatccgcgcccaggaaatcggccgttacgtcaatgacggtttcatcgactgcggcatcaccggacgcgactggatttatgaaaaccgcgcggacgtggaagtgctgacggaccttcaatactccaaggccacttccaagcccacccgctgggtgctggtggttccggaaaactcccctatcacctgtgcggaagacctgcagggcaagcgcatcgccacggaaggcgtgggcatcacggaacgctggcttcaggaaaagggcatcaaggcccatgtggaattctcctggggcgctacggaagtgaaagtgccggagctggtggacgccattgtggacatcacggaaacgggcagctccatcaaggccaacaagctccgcatcgtggacaccttgatgacctcctatccccagttcatcgcgaaccgggaaacgatgcaggacgaatggaaaaagcagaagctggaaagcctggtcatgatgctcaggggcgctctggaagcccgccggaaagtgggtctgaaaatgaacctccccgccgcttccctcaatggtctcgtggaagccctgccgtccctgcgccgccccaccatctcccacctggcggaagaaggctggctggccgtggaaacggtcattgacgaatccgtcgtccgggatatcattccgcagctcaaggccctcggcgcggaaggcatcattgaatacccgctcaacaagctggtctattaacttttttctcaccacagtaaaacaacaaacgaaccacaatcatgggatcgctcaaaaaacgccgtaaagcaaaaatcaacaagcataagcgcagcaagcgcatgcgtcagaaccgtcacaagaagcgtttgcgttacaagtcctaaggtttgtgcgcttcgctgctcaaactggcagtctatccgatttccggaaaatcccggcgtcctccgtccagcggaaggacgccgtttttcttttcaatggaatcagcgttggctaaaaggaaactttccaacacaaaaacaatatctttagtgaagagaaaaagacagcatgtgtctttattccattgttttgtgatgcgggttgatggtgctctgcataagggaataaaaggacaggtcaagatgatgaagcgatgctggtgtcgtctccctcccaatccgtaaaagaaggttttccgctcatcccccgcactccattccccttcgcacgattgctgtcagattatatcgttccgaagtgaaagattagatgtggaactgagcatgggaaattcggagaaagtctagttcactttgagcaactcctaacataaacgcaaacatctaaagaaagtaatagagttcagtaaagaacaaatcttttctttttctttaaacaaatgaaaatagagttatctggtctaatttaggagtttaaacgtagcaaatcattttaggaaaagaaattgtaatgctttgttggagaaatataggagagattcaatgaactgccaaacgctctctgtcatgctgtcaatttatttagaattgagcttatcaatatcgtaatcaagcggattgagatggggttttgcggattgcttaatgtgggcatcatattcttcagcctaaggtaatctcctttttctcgtccccatattcctggcgaatccaatattgtctcaattttattctaaaatcattgactttttgcctgaattctgatttttttgtatacgtattacaacctatacttctatgaaacggtcaggacagttattcatgtggggaaattttttcttcatggcaattggagcattttctttagggtttgcagaagatggagatttagaggacgaagggagggatttatatatcagttcgaagacacgcaagtattctgctgaatgtatgatctttgatctggatagagaggaagatcaaaaacgagaagatattggaattggagaagaagcggatttagagttggagggaaaattactttctcttgttaataaggatgagatagaatggaaactttccgaacaaagtgaaaaatgggcaatactaacaattaatgaaaaggataaatttaaagctgttttaacggctaaaaaggatcctgttatcaaaggagaggtaagtgtggaagttaaaactaatttggacgataagcccaagccaaaaaaatttaatgttctggtaccaaacaaaatagaagggataaatctttctgaacggagtcctgatggtccccgtgatgggaaagtgaatgaagttggggcttccactcatttagctttagtctttcagccgcggacggtgagcttttcaaatataaactttatagaaagatcattggataaacctgaggatcttcctgaaggattggctcctcatatgcctaatccaaatccacaacgaattgatgagtataatggacatatgagtgatttaattggagtatatccaccgaaggaacatcgggaaaattcaatattattattccaaaatcttccattgccattattttatttttggcgttgcgggttttacactgttgtcaatgggaaagattgttgtttaatcgatgatgtagtgtatattcaaacatttgatgaaagttatgatgggaatcgtatagatgggttgaaaaatttcaaagttaaaatttgtaaatttggatgttctgttgaaagaagtacaggaggggacgccattcatatagatacaggaacgagagatgattgatctgtaagtataataattcagttagtcaaacaatctgttatgaaagtaatatatatattatcatgttttattttagttttttcgactgtaagcgaggccaaaatatttgatagttctttaaaaaaacctctccttcatgaaactaatgaaaaattatatctcctactatcaaacgctgaaaaatcagccctgcagggggatatttttaaattttatgaacaagctaataaaatactgcctgatataaaaaatgatttgcaaaaagggatgtggcttttttatttggttgccgcagttccctttattgatgacactgtagaaggtaacggagaatggctatgcgaaaattctgatcttgattatgaagtgaaggaaaaaatgattttatcattttttccgaaagaaattagaaaatctaacggaacaaaacttcatgacgaggcacttgtgatgagagaattgtttctgttatattcatccataatattgaatcaatttcgacaagaattgaatcctctttttctttatacatataaatataatagatttttatatttatataacatggatcttaggcaggatagagatagatttacaaaatattgtaattacatgaatgttagaattgggagacaaagaaaattgaattcaatcatcaataatatggaagaggattttgtaggaatgttagtccaattttatccgactaaagctgtacaggtgaaaagatatcttaaattggcgggatatggtgatgatgaaattcctgatttattggataggacaattggacgagttcctcaagcttcctacttgtacaagggttttcccaagcgcagaaaataattggtaaaaaatatcctcatagatagttttcttatttagcctatttatgtttaaactcttattcctctatttgttcttcttgccagcggttgttgctggagatttgtcccatcagcgcctggcatggcaggtggaaggaggggatgtgcggaatattgccgggctgtgccggcaatatgttcaaaagaaattggaggcggaaaaaacgttttccgtggaatctctgttgaaggaccgggaggtggcgcaggcttgctacatggcccatttttttgcgttggtggggaaggaaaggacttacatccttcatgaattgaaggacaaggaatttgtgcaatggttgctgaatcacccggaggtgtttgaaaaactggcgtttgccaaggcctcgggaaagaatacgctggctgtattgcggaatatctgggtgaaggaagggaaagagctttccggagttggcctcaacatggcattgggtgcggcgttgatttctacgtcccgggagccggaggcatgcgaagcccggtatgatttttacaaaaagtcttttgcggagaaaaaactttttccgcagttcattacgctggaaccgtgggaattcggcattcttttccggggcagggaaagtattgaggagcttgcctgggcacaggattacctggctggcaaaaagaagatcaaggcggggaacgcagggtatgcctgttgcggtctgatcccctaccggatgaagaataagcagggaatcagcgtgcatgccggtggagcgttctacgatcataaacctatttctttgcaaatttacgtggagtatgggggtgtgtgcggcgccgtttccaaaggggcggccgggtttgtgaaggcgaaggggattccttcctacacgatcggccagccagggcattgcgcctttgtgtggaagggggcagacggagaatggaagataggaaataacatttatggctggatatggtcggaaggcgggtccggaggaccgtggaaaggttccgtttccacgattacagagctcccccgtttttggaaggggaaggatgccgctgcatccaatctctgttattatttatccctgctggctgccgatccacagaaggcggaagcactgctgaaagaggcattaagacggaatgcctccaattatcccgcatggcaggccttgatgagaaggaatgtccgcctggcggagaaagataaattggctttgctggaacaattcaaggaggcttttcccggaaatcccactctgtgggagtatttcatgaagaatgaactggggcttgattggaaaaaggcgaatggctatgccgtttatccaagattgctggcgcaaaatgaatcatgggattctgtagacgcgtatatgcgcaatttctgtgctttagcccggaaagatattccggatatggctggaaagttgccttatggggtgaaaaccaagagaatctttttcaaaaactggctgaaattttaccaagagaacaaaatcgaccggaaggtgagggtacaaacctgcgctgtgctggaaaaggcgcttccttcgctcttgagtcatgaaaaaacggcattgcagtttctagggttttatgggcaggtgcttgatttatggaaagacaagcaattgtcggcccgggccgataccttcctgacggtatggttgaaggaagtagacaaagcttccgtacggaagaagatggcggaaataggtctgaaagtagccgagcatctgggagacaaaaaagcgctggttcgttatgcggagactcaggctggatattgaatagcgtgattctttctatctacatagaataatcgtcttttctggactggttggtgatcaacatggtttgagattattcaaacttatacggtcaatagtctggtagatgaagagaagtatctatgtaattattgttaattttatgttgccaggtatagtggttttttcttggattatctattttttgctctatcatatgctttgatgaaatgacacctggtggcaagtttactcgtattgagtatgttatctgtaggtcctgccaagaatgcaaccaacccttgtagagtggaattagtaggtatcatgttttttaccactcctattggttcggaggttcccaacatagcaggttcccaggatgaattggagattgattgggagagtgctgcaaaagatttactggaagaaaaattaggatctgtcgtttcggtgagagtggatacaatttcattgttggcatttattaattcaaatgggaaattttttgcaaatgtccatttagtgtacgcttacagatttcttcaccatcataaacctgttactgcatggaaattgaaacaacagaataacttgatggataacggtatagactattatcaagttgggacggctggagtaagaagtgctaaagcggccgttttaaatgctaaaagaaaaattcttagtggcttggaaaaagaattgaaggaacaatgtaaagaacatcagtaaataattatgaaatatttaatgctatttaatgcttggattttttgttttgcaggcattgcagattcaaatgccgtcgaaagcaatatttctgtactggagggaattggttatgaaatgaccaatcccatttctgtaaaaggagttaaatcaagaaaagaacttgatgaatattgccggaattatgtatcacaacatcttccttcttatgagataggagatacgatgatttatattttaggacaagatactgtacttgaattggaatgccgggagaaggaaggaagcgcaaaagtttcattgtattttaacatctcggagtatatggataaagttaagaaacaaaataagaagtctaactctaaattcttaaaatccgtgaaaccgatggatttcccggaagggatttccttacgcaagcctattgtattaaaaaaggctgtcacccgtgaagaagtacagaaacagcaagagcaatatttggaaaaaaagtatccgggttataaaatcacccgaaaggaaacctggattttccataagaagtttttggagagggtgagtttgaaaaaagatgacgaggaattaatcgtcaattttgatgtttccgattatatgaaagagtatgaaaagaagcatcagttaaagaaaattcaattgtctcctggtgtagaaagagtggaactgcaacacgcgcccattccgtgaaccgtgaagcaattccgccgggttggagagtctgttttttctcccggattcaacagcaatcatatcaggctgtgccgcatcggaatcttatgcctccttttcttcccggaaccgtttcagaggaatggtgatggtgaagacggtttcccggtggggagtgctggagacggtgatggcgccgtcgtgagcctccacggcgcgtttgacgatggaaaggcccaggcccgttcccttgatttccgaggagtggtgggtttccacccggtagaagcggttaaagaggaagggaaggctttccgcggggatgcctacgcccgtgtccgtgacggtgatcacgcaggcttccggtgttctggccgcggccacagtgacggaaaggcccggttccgtgttttgcttgagagcgttttccaccaggttgaacagaacctgcgtccagtagaaggggtccccgtagagttcccagtccggcggaatgttcatgtgcagggcggcctgttttttctcccggatggagtccaggcgggagaagacatcatctacgcaggaggtgaggtggaaccattgttccttcaggatggccttgtggcctgattccagcttggagatcatgagcatgtcttcaatgatgttcatgagccgctggctgttctggtgcatgacgccgatgaatttgcgcgccagtccggggctttcctccatcagattgtcttccatcaggttttccagatatcccacgatgatggtgagcggggtgcgcagctcgtgggaggcgttcgccacgaagtcccggcgcatctggttggtgaggtagttttgcgtgacgttgcgcagcaggatgcgtttttccttgatcggggtgtccgtgatggcgctgtccaggtgccacgccgtgatgccgttttgcactccgccgggggagttggcggcgctcagcgtaaattccttggtgacggggccatccgtgtcaaaggcttcctgaacatgccccagcagttcctggttgcacaccagggctcccactttgcgtccttccagcctttcttcctgaaagagttctttggccagcgtattggccagcacgatgtgcccggcgggaccgatgagcaggaaggcctcacccagagcttccagaaagcgccgtttgtccacgatggcctgttcctgggcttcctctccgcgtttcagcaggcgttgggcgtcccgcaaggcctttttccgggctttcatggcggaccggcatacctggaccaggtgccagttcaggtacagggaggccagaacaaggatgatgaggatgtagtcgatggccgacatggaaccggagcgttagacctcttcctccgggggacgccgccccggcagggtaaagcggtagccgatgctgcggacggtttcaatgcagtccgcatagggtgccagtttctggcgcagccgtttcatgtgcgtgtccagcgtgcggctctgggcctggtggctgtatccccacacgcagctgagcaggtcgttgcggttcagggtctggccttcccgttcaatcatgtagatcatgagcttgaattccgtggccgtcaggtccacttcctccttgtcgatgtagaattcgagggcgtttttgtcaaacgtgaagggcccgtattccgcgatgacgctgcccggcgtgtgttcgcaccgtttcagcacgctgcctacgcgcagcacgagttccttggggctgaatggcttggtcacatagtcgtccgctcccagctccagtccctggatgcggtcttccgcctgggccttggcggtcaggaagatgacgggaatgttctgcgtgcggctgtcccggcgcagctctctcagtacgccgtggccgtccatgcccggcatcatctggtccagcagaatcagttccggcctgtccctgcgcgccacttccagcgcggtcaggccgtcataggccgccaggggcgtgtggcctgcgcgttccaggttgtaggccacgaggtctgagatggcgtgatcgtcttcagcgataagaatggttgccatggctgttttttacgatgaaggaaggggcggtgtcccgatattagatgtgacgattcgttcacatttccccgtccggaagggtgttccggacagctaaagtctttccttatgcaaacagactgtaacggaggcgtttccgttttgcaagactggcctagattcaacttctcttccctgcgtcatgtgatacacttgtgccgcaacagttatattgttatgcgaagcgatagagttaaagcagggttcgagcgtgcgccgcaccgcagtctgatgcgtgccacggggatgacggatgaggatttaagccgtcctttcattgccatttgcaattcctttaatgaggtgattccgggccatgtccacctgaacaaggtagccgccctcatcaaggaggaagtgcgcaaggccggaggaactcccgtggagttcaacctgcccggcgtttgtgacggcattgccatgggccacggcggcatgaagttttccctggccagccgtgagttgatcgcggacagcgtggagacgatgctgagcgcccacgcgtttgacgccatgatctgcattccgaattgcgacaagattgttcccggcatgatcatgggcgccctgcgctgcaatattcccactattttctgcagcggcggcccgatggccgccggcatggcggaggacggcaccgtactggacctgaacagcgtgtttgaggccgtcgcccgcttcaaggcaggcaaaatcaatgcggaggaactccattccctggaatgccgcgcctgccccggcgccggttcctgttccggcatgtttacggccaattccatgaattgcctgagcgaggtaatcggcctggcccttcccggcaacggttccctgctggctacttccgaggaacgcaaggagttctggaagcagaccgcgcgccgcgccgtggagatggcgaaggcggacggtcccctgccgcgcgacatcgtgaaccgtgacgccatcgacaatgcctttgcgatcgatatggcgatgggcggcagctccaataccgtgcttcatacgctggctatcgcccgggaagccggcgtggagtatgacctccagcgcatcaatgacatttccaaacgcaccccgaatatctgcaaggtggccccctcttcccgcttccacatgcaggatgtcctgcgcgccggcggcgtgagcgccatcattcatgagatcgccaggattcccggggctctccacctggattccatgaccgtgagcggaaagacgctgggtgaaacggttgaaggatgcggcattacggatgaaacggtaatccatccgctggaaaaggcttattcccgtgacggcggcctggcgatcctgttcggcaacctggcccaggaaggcgccgtagtgaagaaggccggcgtgcatccggacatgatgagcttccgcggacccgccgtgattttcgagtcccaggaggaagcctgcgaaggcatccttgccgggaaggtgaagtccggcgatgtggtcgtcatccgcaatgagggacccaagggcggccccggcatgcaggagatgctggcccccacgtcctatatcatggggcagggccttggcgcggaagtggcgcttatcacggacggccgtttttccggagccacccacggagcctgcatcggccatatttccccggaagcggcggaaggcggcctgatcggcctgttgcggaacggggatattattgagtattccattccggaccgtacgctgaacgcccatttgagcgaggatgagattgcacgccgccgtgcggagtggcagcccacgtacaacaaggtttcctcctcctggctgagccgttaccgccacctcgccacgaatgccagcaatggcgccgttctccggcgcggggaataatggctcccttttaaatggcagccgctttccctggtgggaaagcggtttttttatgcctgcctccggttcacaggcggctggcaagcggtatggccggattagcctgcccggcaggaatgagcggacgccggtacattcatgccggaggcgaccgccataaaaggtctgtccggttaaagcggaaccgcttccctcaacaggaagcggttcctaatcaacaattcatactttcccgggaaatttttctatttggagattttgaaggggccgcccattccttccggggagagaacggtggattcatatttggttgccgagtagtagccctccgttgcggaagtaaaggtcatttctccggagctggtgatggtggagggatgttcccctccgtcagtcagcgtcatggagaaccgggcggaagccggacccggcgcataggagtacgttccggaaaagcggccgttccccgtttccagcgtagtgggggagatgattttgtaggagactccatggccgtccgtcatgctgatgacggagcctgtttccagtgtttgcgggggctggactccggaggagtccgatttgccggagctgccgccgcaggaggccagcaggaccgcacagcccagcgtcaggatggggcggattattgttgaagaaggcatgaagagaagggttgaggattgcctccccggtcccgtggggaaccggggagactggaataggaacgcccgttagaatgagtaactgacggagccgttgattccctgggccgtcagcccggccctgctttccagggagtacccgatgcgggctccccatctgctgccgaaggcggcgcttacccctgcgttgacgcgcagggcggtgcggcctacgttaacgccgcgcgccgtccaggttcccagctcactgctgacggttcccttggggttgaggcggctgaggtcctgcgccacggcaaccgtcacgctgggcgtcagcgtggttttggcgcctgccgcataggtgcgggagagagtgacgcctacgggcagcgtccagttctgggcgcgtgctccgctgaaggtccgggccaggtctccgtgttcggagaagctgtccgtcttcccggtcatgaatcccagcccggcaaacggcgcgatgaccagtttgctgcggagctgttccgtccaagtggcatagacggcggctccgaaggagtcggaatcaaatttcccgctggcggaggtgtccgccatgcgggcctttccgtcaaaggacgtggtgccgaaggcggcataaccgtccagggccagcttggaagcccctgcgggcgtgtagcggccgtaaagcatggccatgaaggagtccgcgtcatagctggacaaccctcccttgtcctggaaggttccgtaggactggccgatggctaccccagccagggcggaggaggagagcttgcagtccgcgcccacggcatagccgcctgcgtcgtatttgtagccgtcgatgccgctccgtgcgctctggttcgtccaggaacccagtccgcccacccatacggagccgcggcctgaggccaccggcgccatggcgatgggggagcccttcgcgtctgcggactggatcggcttcgccgccggagcgttcagcccctgtgcggcggaaatggctccctgcgtcctgcccagggcggcaaagcccttgagggcgtcattggaggcccacgccgcgttgaccacggtttcaccgctgacggattgaatcatggctgccgccgcgtccgcgctggaggttcccaggagggtttcaaagaacctgtgtgcggctgaaccgtcccggactcccgtccgggcctgttccatgccggctgccgcgccggagacgtttccggaatatccctgcatgggggcggctactccgtgcatgttctgcgtcaaccggatggttccgtcttcatgaagtgcggcgttagtggagacaaaggcggagttgaacaggggcagttcgctgacatcggctccggtgatggtgatgttgcccacggaagaagttccggctgcggtgtgggtgaggtcccttccgtcgcccgtttcaccggcattccagagcttgatggaggaatggccgttgaacgtgatgccattgaggaggagggaagagccctcgcccatttcaatcacggcgtttccgttgagttccagcgtgtcgccggccagggtggaatcctccgtcagaataactcctcctccgttgatttcatagtccgtcaggtctttaacgcccagttgcgcgctttccaagaccatggtgtcatccagatggcccacgatcagggaaccggctccggaatcctggatgaatgttcctccgaatccgttgtcttccgtgtcccggccgccgtagagcaggtcgccgctgcccgtctgcaccagcgtggcggaaccgcgcgtccacggaccgccgtcaagggagtagtagtccgcgtcggaaatcccgctgttgatgatggtgacatcgtccgcggcggagtccaccaggatgacggagccgtcttcggcgaaaatgtcgttggcttcttccccggccatattgccgtcaaagaaggctccggagccaatcagaagaagacggtcttccatcagatggatggcccctcccagtccggcggcggtgttgtccgtgaaggtgacatttttgcctatccagatattggcgccttcattttcaaataagtcgtccacattatcgccctcctgcattgcaagattggtcgtcagctcggaggcgatggctccgccgttggccccggccgtgttgccggagaagacggaaccgttccctaccgtgatatccagcacttccgtggtcagtttggaggtgcgttccccgttttcataggtgatggcctcggcaatgttgttctgggcgaagacggctccgccggacccggcggccgtattgccgatgaagcggttgttttctccaatgagaatgtctccgtgcgcgtagagggcgccccctctggaaatatccatggcggcggacctgcccggggccttgctgttcatgaacgtgttgctgcggcccgtggtgattttgttttcacgttccgtaacggtaacggttccgttgaggatgtctccgttttcatccgtgtcaatgatgctggcgtggacgaggctgttatccgcatcgctgaaggcgctcatgtggtagacggacgcttcttccgttccctgataggtcacgttgtcccctagtatgatggtgttttccgcggctacggtggtcatggtcagcgtagcgttgtcgccaatgactacgttcccgccataagttccttccgtgtattcgccggaggccagcacatagtcgccgtccgcgttctgcttgagcgttccttcaaaggagatggttccgcgggaggaggcgccttcgtcgtcaatggctcccaccgtatccccggcccagatatcggccatctggctgccggaaaggtcgttgtccccggtgatttcagtattgctgccgatgtagatgtctccgccttccgcatagatatccacgtcgtccagcgtggaattggccccgatggaaacggtggcctggtctcctactgcggtggttatgcggacggtacgggttccgtcttccccttcagccatggagaaggaattcagttccacggatacggcatccagcgtgacggatgccagctttgccccttctccgatgaagatggagcctttcgcgtccatgtcataattttcaatggagctgccgctgccgatggcgatgtcgccatacagccccatggattcttccgtgctggttcccggcaggtaggccccgtcttcatcttttctggtaatgccatgggaaaggacgagggctcccgtcgtaatttccgcccggtccgtggctttcaggatgctgttgtttcccagcagtatttcgccgcccgtgaaccggtctccatcgcctgcggtgctcagatcggtatccgtcatcgtcacggctcccgcgctgaagtcaattcctccgcgggcgcccacggattccgactggccgatcagagtgccggactcttcgttttcgtaaacggacgtggtgttgacggcgcctgtggagacgagggtggaatcagccagggcaatatctccatgggagacaatttggccgcggactccgtcattcatggataaatccatttcattgatttggacgtcttttcccagctccatggcaatttctcccggtgtgatagtgaccaccgtggagataaaggcccctgtttctgggtccagtctggtttctatggaggtggcgtggctggtgacgacgtcgttccggttgagaatggctccgtctcccgccaccagcttgttgttttccaggacaagccatgtgccgtccagggtggagccgtcttctatggaaagggtgtttccggcgtcgctccgcccgctgagcattccttccgtcatgctgcccacgcggacggttccttcaccgtccacatttagatcctgcatctccacggcggacatgtccttgtagttgaagttggagatttttccatgcccgtctgatttgaggacgatggcagcgtctgcgggcaatgcgctcaattctattccttcaaaatcgatggagccggtaatgttcagcgtgtctccattggccatctggttccaggcggcctggaattcttccagggtggaagctgtatattcggcggcgaaggcctggcttccaaggacgcacatggctgccagcagagcccggcgcagcgggaggggtaaacgaagattcatgatttgttatattcagattaatttaaagaaaagtggaaatgggtgccttttccctgctgaatttctatgtacaggattgttaatcctgtgcgtctgaatatattccgtccgttttcccgcctccggcgcatgaacggcgcgttgtgcggcggaagattgaatccacggcttatctaacaaatagatttttatttgtacataagaaattggccgttaaaagggattaatagatgaaaatattgtaatttttttcttgctaacaggattaacaatcctgtgatgtatcatgcattaatatcaaaaacatggtgttcggaatggcgaaacatggagaaaaccggaataaatatttggcggcggaaatgttgttgaaaggaagcggtttgaatatgctggatgcagccagtctggccgtggaattgctgagcctgtgcggggggcgccgcagcatgcgccgggccagaaaggcaattttcctgggagcggaggaattgaggaaaggggaaaagacggtttccttttccgccgccgtggaggagacgctgagggcgaagcgcgggcttcgtcccacaacgctgcgtgatatcaggtatttcaccggagccttgatgcggaggtgtccggaattgaaggattttccggtccggaaactgacgccggagcattgcgcgcgttttttggaaactgcgttttcctcccgcagacagcgttacaagggccgtgcagtgatgagcggcgtgctgtccctttccctgcggcgcggctggtgcggggaaaatcccattgtccgggtggaacctcctgcgttccgtgaacggaccatcgccgttctggtcccggaagaaataaaaagcctccgggatgtggtggaaattcctgaattccgtgactgcgctccggcggtctgggtcatgctgtatgccggcatcaggccgggggaagtgatgcgtctccgctggaatgacgtggatatggaagaacgggtcatttccgtaaggtccgtagccagtaagacggggggagcccggcacgtcaccattcatgccgtgctccggcggcttctggcggaatacggggcaggggagcgggatggcttgctatgccctcccaactggccggtgcgctggaggctgctccggaaaaaggccgggtggggcgtgcatcaccgcttcggggaatggagcgcggatgctctgaggcatacctatgcttcctatcatgccaagtggttccgggattttcccctgcttcagatggagatggggcaccgctcctcctccctgctgcgggcgcggtacctgaacatggagggagtgagccgcgacagggcacgcctgttctgggaagtgccggaacacggaaggaaaaagcggatcgtgcattgctgaaaagggaacggaccgttccgcaggttttccatgaaaaaacagccgttcagctaccgtggcgggagaagggcggcatgcaggaattcccggttttattccctgggcaggaagtagccgcgctgtttttccgagatgggcatgcctaggcgttccatgacggccagcatgtcttcccagaccttgcgtttttcccgcgggctgtctgatctcaacaggtagctgggatggtaggtaacgcgcacgggaatgccattgaggtcgtggaacctgccgcgcatggagctgacggaaccctgtatccccagcagccccacggcggctgtcccgcccagggctacgatcatcttcggctggatgacctggatttcattcatgatgatgggcaggcaggcttcaatttcttccggcgtgggggcgcggttgttggtccgctggttaggcagcgcaggacggaatttgacgatgttggagatgtagaccatgtctcgggagagtcccatggccttcaatatctggttgagtttttccccggcgcggcccacaaagggctcctgctgcacttcttcataatagcccggcgcttccccgatgagcatgagctccgtatggggattgcccgtggcaaagaccatggtgtcccgcagggaattgagctcccgcgccggctgccagttctgcgccagatcccgcaggtattgcagcttgtcttccatcgtcccttccgggagagcgacggtggaggccggttcccggctctccggaaagagctccggcggttccggtgccccggaagatacggaggccggggcaggttccgcctggggcggcggttcaggagaaacggggggagagggtggagctgcgggaacggcagcggcggggcggcttccctgtttggcggtcacgtaccacgtcctgagaacgtttctggcttcatccgtcaggctcgtgcgcgttgttccctgctggatcagggaatcgagataatggcggaaaaggctgttcggcgtggcggtcatgggaggataaggccagattagtccatgagaggccgtctgtcacgacgatttgcaggggcccttctttcctcatggagcgctccgctccgggaaatgacacggtaaaagatggaatcctttgtgagggaagaggcaaattgggcttctccggttcaggcgtggaaatggccttgggcagccggctctctcaaattttatttaatcttcctatgtccttttctgaagaattaaacggtctgatggaccatccctcttccctggtgcgccgcttcatggcattgctggaaccggtggacgacgcccgcctggaggcgatggcgcaggagagccgccgcctgacgcgcctgcatttcggccggaccatccgtctctttgcccccatttacctgtccaacgaatgcatcaataattgcaagtactgcggtttttcccgggacaaccccatcatccgcaccacccttacggtggatgaagtggtgcaggaggcccgctacctgcacgggctgggcctgcgcagcatcctgctggtggccggggagcatcccaagttcgtttcagacgggtacatgcaggaatgcctggacgcgctgcattcctttatcccctcgctggggctggaaataggaccgcttccggacgaccgctatgcggaaatcgtccaccatggggcggaacaactggccgtgtaccaggagacctacaaccgggaggtgtatgaaaccctgcatacggcgggcatgaagaagaatttcaactggcggctggattgcccggaacgcgcctaccagggcggcttccgccgcattcagataggcgccctgttcggcctgtccccctggcggcgggaggccatggcgctcgccgcccatctggactatttgcagaagcattgctggaagtccgcgctttccgtggcgttcccgcgcatgcgtccctacgccgggaattacgagtatgaacccgatccggaactgatgctggacgaccgccattttgtccagcttatggccgccctgcgcatctgcttccccaggataggcatgtccgtcagcacccgtgaacccgcgccgatgagggatgccctgatgcatctgggcatgacccacatgtccgccattgcccgtacggaaccggggggctacacgggggtgggaacggccaccgcccatttgacggtgcggggaaaccaggtggaccttcccgaggaccggaaagggcgctgcaaggcaacggagcagtttgagatttccgaccagcgcactccggaacaggtggtcggcgccatccggaatgcgggcctggagcctgtctggaaggactgggacgccgcgctggatgtggtgtaaagggagtccggatgcccggcggccgctctgcggaatgacagccatacttgcgtgatgctgtgatggagcattgacggcatgccccgtctgtcatatttccggggacgatgattcgttattattgggggaggttttggccgttcctcctgctcgcgttcggtattgaggcggtggaaaacctgtttacggtgttttttgaataccgcaacatggatttcggggtcattccccttctgaagacggcatacattttcgtgacggagttttccatcaccatgtgctactggctcatcccttatgccgtttatttgtggattctgccgcgcggtagggcggggggaaaggcggaccggtggatcacctgcgcatggtttttcctgtttgtgctcgccaacctgtttgaggacgtggcggaagccttcttctggaatgagtttgaagccagcttcaatttcattgcggtggattacctgatttataccaaggaggtgatcgggaatatttatgaatcctaccccatcatcccgattcttatcgccattctggctgtatccgtcctggccgtctgggggatgaagcgttttctggttccccgccatggggaagctcccgcggggtggaagcggggctgcgtggtgctgttcctgctggcgtgcataacgggagggtattggctggtggacatcaaggatgcggatgccgtgaacaaccgctataactcggaaatggccaaggacggcctttacagcctgttcagcgcctttctcaagaatgaactggactaccgcgattattacaagacgctgccggacgcggatgcggcggcgtttctggcccgggaattcacggcggatgacacgtccgtgcctgacgccgcatcaggcagcgtgaagaggcgggtgcgcccctccggggaagccatccggcccaacgtcgtggttgtggtcatggagagcatgggggcggagtttttaaacgagtgccgggaggacggcgcgaatgtcacgccgtgcctgagccgtctgggcaaagagggcattttcttcccgaatacctatgccacgggcacccgctccgtgcgcgggctggaggcggtcagcacgtccataccgccgctgcccggcatgtccatcctccgccaggaggggaatgagcatttgcagaccatcgggtccatattcagggacaaggggtatgacctcaagtggatctacggcggctacgggtattttgacaacatgaattacttcttcgggaacaacggcttccaggttctggaccgcaattccatggatgattcagaggtgacccattccaccatctggggcgtctgtgatgaagacctgttccgccgcgccgtgcgtgaggcggatgagtccttcaaaagcggctctccttttttacaggtggtgttcaccacgtccaaccaccgcccctatacctatccggaagggcgcatagacattccttcccataccgggcgcatgggcgccgtcaagtacgcggattatgccgtgggggcctttgtggaggaggccaggagcaaaccgtggtttgagaatacgctgttcgtgtttgtggcggaccatggcgcgggcagcgccgggaaacagacgcttaatccggaaacgcaccgcattttctccattttctacgctccggccctgctgaagccggaacggattgagacgcctgtcagccagattgacgtgctgcccaccctgctcggcctgctgaaatggccgtatgatgcggcgttttatggaaaggacgccttgaaaccctcctaccagtcccggtatttcgtgagcaattaccagtacatcggctacttgaagggaagggacatggtggtgcttaaaccccagcgcggcgcggagtttttccgtgacggggagcctgtgaagccggatgcccggatgaaggagctggaaaaggaggcggtttattattatcagcacgcttccggctggcgcaccagtttgaaggaataagccctttcccgtgatgcggatgccgccgtctccgcggcaatccgccaagggaggggaaccggttcaggatttgggttcgtccctgtaatcctggagggcgtcccagtggaacgtgaaatgcttctgcatgtgcagcccgttggcgaggatgaacatgagggaaatgcggaattcgttgttggtcagcccgtccagttccttcttgtcaatcttcatggaaaacttgccgctctttttccccaggcgctgggagaaggaaacggcgtcatagtcctggttgaccgcatagggcgggtcctggacgtagacgttcagcgccttgacggtctgggggctcttgtagcttccggagatgagaatctggtctcccttgaaggaaatggccgtgtccttgatttccacctccggcctgccttcatagaatttctgtgccggagtgacggagaacacttcacaggcgtccagcagggcgcagctggcgggggtcaggaaggtgggactggtgccgaacgtgtagtttcccgcgcccatcagggccgtgccgtactttttgccgtccgaggcggtctggtggttatggggcaggttgaggccgtggcccagctcatgggccaggccgccgtaccatttggtcagcagctgcccttccctggttttctggcccaggtgcttgatgtcaaaggccggataatccagggcaaagcaattgcggcccatgccgtagaagggaacgccgccgggattgtcggggccgttcttttcatcgttccaggtaggcatgatgaccagggtgtgctggctttttttcctgtccggattggccttgaaaaattcttcaagctcctgcgcggccttccagccgccgccgttttcatacggatagtgcgccgccgggttcttggccttgtattcaatgatgttcacgcggccgggggatttgatgtccaggccgaaggagcgcgcgccgtagccgtgccgctgcatttccctgccgtaaaactgctggaggtaaagcagcagttcgctgaggcgccgttcgtaatccggaacgggttccgtgtcactgcccagaaagtaaacgacgttgagctgctgggccgtttttttcagggcaatccggtctttcagaacgtccggaacggtgaccccggcagaagatattccggaagccgtcccgagaagggcgaaggaaaaaaatgcggagagaagtcgtttaaacatgcttgcctacggtaggcgcgcgcccctcaaagacaaggaaatttactgtccgcgctaccatttgcggaacaggcgccgggtcaggaggaagaacggcggaaaggggtgcgtcatgccgtgagggtaagttgaaaaggctgaaagatagagattgcggcggcagtaaatatatgacatcctcattaaagcatgcatctccaatctctatttctatctgccgttgcggtgagctccgtttctctgggttggggggccctggacaagccttccgcctccaacctgatctggtctgatgaaccggccgtagttgtttatccgcaggaggacaagaaccccgacggtaatttcggcaaatacaagaagccttccgccgtttgggaagcggaagggtatcccatcggcaacggccgcgtgggggccatgattttcagcgcgcccaaccgcgagcggtttgccctgaatgaaatcagcctgtggtccggcggccccaatcccggcggtgggtatggttacgggctcaatgccgggacgaaccagttcggcaactacctgcctttcggcgatttgttcgtagactttaaaaagggggaccagccagcctccgtttccgtggaggattttacgcgcgccctggatttgcgggacggcatccacaaggtgaattacaaggcggatggcgtgacgtatgaccgcgaagcgttcgccagcacgcccgccaatgtgctggtgctggagtacaaggccagcaagcccggccagttcagcgcggatttttccatcaacagccagcttgaatcggctatttccgccaagggccccgtcatcacctggaagggaaccctgaaaaacggcatgaattatgaaggccgtgtcctgatccgtcccaaaggcggtacgctttccactgcggacgataagatttccgtgaagaacgcggattcctgcatggtcgtcatcgccatggagacggattacctgatggactataagaaggactggaagggagaggcccccgccaaaaagctggaccgttatgcggccaaggcggcctctgcggattatgccgccctgaaacaggcgcacatcgcccagtacaagtccatgtttgaccgggtaaaggtcaacttcggcaagacggaggcggatgtagccaaactgcccattccaaagcggctggaagcctataagaagaatccggttgatcccgatctggaagaaaccatgttccagtatggccgttacctgctcctgtccagctcccggcccggcacgcttccggccaacctccaggggctctggaatgtttatctcaatccgccctgggcctgtgactaccataacaacatcaacgtgcagatggcgtactggggtgcggaacccgccaatctttccgaatgccatgaggcgctgatcaattacgtggaagcgatggcgcccggctgccgggacgtctcccaagccaacaagggtttcaataccaaggacggcaagcccgtgcgcggctggacggtgcgtacctcccagaacatcttcggcggcaacggctggcagtggaacattcccggcgcggcgtggtatgcgctgcatgtctgggaacattacgcgttcaccggtgacaggaaatatctggaaaagcaggcctatcccctgatgaaggaaatctgccatttctgggaagaccatttgaaggagctgggcgccaggggcgaaggcttcaagacgaacggcaaggatccgaacgaagaggagaagaaggacctggctgacgtaaaggccggcaccctggtggcccccaacggctggtctcccgagcacggcccgcgtgaagacggcgtgatgcacgaccagcagctcatcgcggaactcttcaccaacaccatcaaggccgcccgcatcctgggcaaggacgcctcctgggccaagagcctggaaggcaagctgaagaggctggccggcaacaagataggcaaggaagggaaccttcaggaatggatgattgaccgcatccccaagacggaccaccgccacacgtcccacctctttgccgttttccccggcaaccagatcagcaagctcaagacgcccaagctggcggaagccgcccgcctctccctggaatggcgcggcacgaccggagacagccgccgttcctggacgtggccgtggcgcaccgccctgtgggcccgcctgggcgacgggaacaaggctcatgaaatggtgcagggacttctgaaattcaacaccctgccgaacatgctgaccacacacccgcccatgcagatggacggcaacttcgggattgtgggcggcatttgtgaaatgctggtgcaatcccatgccggcggcctggacatcatgccctcccctgtggaggcgtggcctgaaggctccgtgaagggactaaaagcccgcggcaacgtcacggtggacttctcctggaagaacggcaaggtgagcaacgtgaagctgtattccgaccagcccaaggtgctgcccgtgcgcgtcaacggaaagatgacccgcatgaaaaccctgccgctgaaacccggtgcggaagctccgcaggctgctgccaggtaaaaggaggcgattccgtacccggtttcaactccggcaggaaaatgaccatggcttccagctccctctttatgggggctggaagttttttatttttccggcttcactgcgggaagaaaccggcgtttggttcaaaaaagagcggaaaggcacggaaatgagtactgcccggagaaaggattttttctcttaacggaaagacggcgggagacattccggggaatatccggaggaattggcgtgcctgcttatggaaagaggcgcaagacgctcatttctttcccatgcgcccgatcagcgagcagacggtgcaggaatggagggagcacaggtcctcgtgaatttgaagcagggcctggtggtgccacgccttcgcaagaaaggctttcgcgtccggcctgccgcccagcagggattggtggacggagagcacttttgttcccgcctgtccggcccggagggagaggtaatgcagccacgcatgttcgtctcctttcgccgggaaaaggtggttgacggtaaagtccagaattctgtcccggcccatcagggccatggggcggggggacggtgcggaaggcagcgtcacatgggtgctccagtaggggtgcctgagggaggaaagatagtccgccagttcttccgcagggccggaatggcaaagacgcttgaacgtggcaaaatccgctgcgatgacggccagcgcccccgcgcgcctctgcggatggttggccggcctgctgccggagaacgtccaggggaaggagcgctccggcgccagttcaaactgttcccgcaggggccaccattgggtccagagttttttatgatgagccacggcttccgccgtgcaggaatccggcaggacggggagcaggaatcccgccgtgccgaagaggagggcctccgggcattcccggatggcgcgcaggggggcgcgcaaagccaggtgcagcatggcgtccttgttggcatggtagcccagcgtttccgccaggctttcaaaaagggtttgctcttctcctgcgtatttggcgcgttccgcatggcggcggtgcttgttccggaaccggtaggccgctgccgactcaaggagggtttccagaagctccggaggcatggaggttaacaggtcggcgtggcggcagtggcgcaccggggcattgccggaaggggccgtttttgcccgcgccagcgcagcgggaggaatgacggccagggggatgcgcttgtgcctggcgttgcgggtgaaccattccctgcggctgggcgcgcaggcgagatgcaggatgacgccgctgaatgccgggttggagccgtgcccgtggcgttcccagtcttccggagcggggtccagttcaatgtctcccgcctgcggaacgccgttgatgcggatcctggcgtttagaaaatccggtccggcggatttgttccagtcaccgaagtccagaatgcggacctccctgcccaggtcatccgtaaaggaggttccaaatgcgccttccagcaggagaagctggagcgttctctcgtccggaagcccggcagggagggaaaagtcgggttccctgacggcgccttccccttcctccattgctgcggaacgggcgtctccgtacagggaggccatggagcgcatgtccatgttggatgggggaaggttatttatccttctgccgttccagttcttccttcaggcagtcggtcacgttgcggaatttttcttcgttctcttcgctcaattcgctcagggtcagatgggagttgagaacgtgcagagtctggtccttggcatccagatgaacggtgggagcgttctccgagcccaggctggcgcgtatctggtccactttccccctccagggggctgtaggcggttcaatgctgagcagggcgtccagtcccaggctttccagcgcgctcaggcagcgttcgctgggggaggcgatctggacggagccgccgatgggcagcagccggcgcgacagtcccgcaagagtgcccatgaaggtggagtcaatgccggagcaggtttccaggtcaatgacgatcaggcgtcctccggaagcgatgtaatcatcccccagggatttgacggtcgggctgttggcgaaacttccgcgtccggagcaccggatccaaagaaattcgtcaaaaaggccgaaaaggatggaagaattgttattcacgtcgttggaaaatggaaaccgtatgaataacaagagaagacgccgcggtcaagtcaggatttaacatgcgcgccgccggaagaaggcgtatcccccgtgtgcggggcctgcctccggcggctctcttcccgttgtgtggagggagcgccgtgcggttcagaaattcctggcgccttcccccgtgccggggaggaagcggtaatacacctccagcatcagcgtagccaggcactggcggtaaattctatcgttggcatgccggttctggctggtctgcaccactccgccgggacctccgaagccgttgggcataaagctcccgtcggaggcctgggcgccgagggtggaatcacggaaggccctgttgtaagccttccagacgtcaccgccgcggttcatggccgcctgcaccccgtagtaatgctggtagagattggaggaagtgttgttggccttccagttgaacggctggttggtattcttgagcatccagtccagccccctgcgcgccgtgctgtccgagccgctgccgcacatttgcagggaaagcacgcccacgcccaccagggaggcccgtggttcccggccgttttcctggtaggaaaagaggccgtccggaagggcggttttgcggcagtacatggccgccttccgcagggccgcgcgtatctctcccctggaaggtttgatgccgccgtgttcggctgccttcagggcctgcacgttccagccggtgacggaaaggtccgtgtgggctccgggctgggtgttgtaattgtaggcccagccgccgttggcattctgccccttcataatctggtccacggccttggtgacgacttgctccaggttggcgatggagggaatgtccatttgcttgcagaaggtgtaggcctcgcacagggcataggtggcgatggcgtggtcatagctgacctcgttcatttgcggcaccagggagatgacgggggatttcattccctggtccaccaggaaggagatgcccttcaggacagtatcgccgaagtcctcggaaagaggtgtttcgcagtgggccagataggagagcagggagagcccggtcatggcgcacttgtaattctgggggccgtccccccaggagccgtccctgttctgctgcttctggagccacttgagggatttgaccacggcttcctcgcactgcggggtgcctccgttttccgtgatgcgcttcatgcggtcgttcaggtcgcagcgcttggaaaggacgtctgtatccggtttgtcccatcccgggccttctccgtcgtcgaacgcgattccgtctccgatttcaatacccgtgaaaaactcttccgtgggagcatcctgttccaaatccggaatgggcacggcaatatgcaggggggtgctggaggcaatgactttcacctgctggccggcaggtgaattggaagggcgtgtggctttcctgacgagttcgggtgtgtcgggttcctccggtccctggttttccgacggataggtaatgatggaaggcggttccggaaggaacgtgatgatatttgccaggtagagcaggaggcccgtcatggcgacgccaagggcggagacggagaccgccgcggccaggtttttaacgcgctgttgtttcagtgccgcaagggcttcttctgtactttcaatatgcaggctcatggaaggaatggggtttgattaggattccaccatctccccaagagtgcgcaggtacaagttaaaaatttataatatacttatatttagcatgttgttattaaaatgttacttaagaaggcttggaaatacccctggcggaagaaaagcggcctcccgttccgcgcgagggatatgaaaagccccctttcccgggaaggaaagagggctgcgaaaaagccggtgaatttcgtcaggaattcttggtgccttcacccgtaccgggcaggaagcggtaataggtttccagcatcagcgtagccaggcactggcggtagatgttttcagacttgccggtcatgccggaaacgtaacccacatcgttcttccggaagctgccgtccgcattctggccgctgagcacggcgtcccggaacgctttgttgtaggaggtccagacgtctccgccgcggttcatggccgcctgcacgcagtagtagtgcatgtaaaggttgctcttgacgttttccgtgccgctgccctggccccactggagggtcttgacgttgttcttgatccagtccagccccttgcgggcggcgctgtcagaaccgttgcccgtcatttgcagggaaagcacgcccacgcctaccagggaggagcggggcatgttgccgttttccttgtaggcgaacttgccgtccggcatcacattcttgcgcacgtagcttgaggccttgcgcagcgtggagcggatatcccccttggtgggcttgatgccgccgtgctccgcggccttcagggcctgcacgttccagccggtgacggaaaggtcgatgtccggattgatcttgttgttgtagctgtaggcccagcctccgttggggcactgggcgtcaatgatcctgtccacggccttgatgacgactttttccagattggcgatggagggaatgtccatctgcttgcagaaggtgtaggcctcgcacagggcgtaggtggctacggcgtggtcatagcagatttccttcaaggcgggctgttccgagatgacgggatttttcattcccaagtctaccaggaaggagatgcccttcaggacgttttccccgaattcctcggaaaggggggtctcgcagtgggccaggtaggccagcagggagatgccggtcatggaggcgcggaactggccttcaccccaggagccgttgccgttctgctgttttttaagccagcggagggacttgaccacggcttcctcgcactgcggggtgccgccgttttccgcgatgcgcttcatgcggtcgttcaggtcgcagcgcttggaaagaatgccgggaatgccgcctccgtccccgtcgcccgtgccggtcccgaagccgtcgccgatgtcgatgcccatggaaagctcttccgaggggacgtccacttcaatgtccggattgaccaccgcgacgtccgccgtggctacggcggcaatcactttcacctgcgcggcagtggaagaactgctggggcgctgggtggtctgggtgacttccggggtgtcgatatccggattgtcgccttcttgggtggcgtaggccaccatggggggatcttccggaatggcgacgatgatatgcaccaaataaaggagaaggcccatgagggcgacgccgaggaaggagacggaaatggcggcggtcagcgtcttgacgcgctgtttcttcaattccgcaagggcgtcttcggtactttcaatgtggagactcatagagggacgtgtctggttggtgcaacggcaaaagctcccgcatccttgaaaaatggggagaattgcccggttgcaggtagatgctgctggcctgcctgtttacgaggctggcagcatactaaaaccagacgcgccggtctgtcaatcagattaggaattcttggtgccttctcccgtcccggggagaaagcggtaatacacctccagcatcagcgtggcgaggcactggcggtaaatcttgtcgttgatgctgcccccgttggtgttcacgaggccccccggcccggggaagccgttcggggcaaagctcccgtcggaggcctgggcgccgagggtggagtcacggaaggccctgttgtaagccttccagacatcgccgccgcggttcatggccgcctgcaccccgtagtaatgctggtagaggttggaggaagtgttgttggccttccagttgaacggctggttggtattcttgagcatccagtccagccccttgcgcgccgtgctgtccgagccgctgccgcacatttgcagggaaagcacgcccacgcccaccagggaggggcgggccgtagcgtcttcccggccttcctgcatataggtgaagaggccgtcaggcttgccgcacttgcggcaataggaggccgccttgcgcagggccgtgcgtatttcccccttggtggggcggatgccgccgtgctccgcggccttcagggcctgcacgttccagccggtgacggaaaggtccgtgtgggcgcctgccttcgtgttgtaattgtaggcccagccgccatcgacgttctggttgtccagaatcttgtccacggccttgatgacgactttttccaggttggcgatggagggaatgtccatctgcttgcagaaggtgtaggcctcgcacagggcgtaggtggctacggcgtggtcatagctgacctcgtttctctggggcaccagggaaatgacgggattcttcacgccctggtccacgaggaaggagatgcccttcaggacggtctccccgaagtcttccgaaagaggggtctcgcagtgggccaggtaggagagcagggccaggcccgtcatggcgcacttgtaattctggggagtcccgccccaggagccgtccttgttctgctgcttctggagccacttgagggatttgaccacggcttcctcgcactggggagtgcccccgttttccgtgatgcgcttcatgcggtcgttcaggtcgcagcgcttggagatgatgccgggaatgccgcctccgtccccgtcgcccgtgccggtcccgaagccgtcgccgatgtcgatgcccatggaaagctcttccgaggggacgtccacttcaatgtccggattgaccaccgcgacgtccgccgtggctacggcggcaatcactttcacctgcgcggcagtggaagaactgctggggcgctgggtggtctgggtgacttccggggtgtcgatatccggattgtcgccttcttgggtggcgtaggccaccatggggggatcttccggaatggcgacgatgatatgcaccaaataaaggagaaggcccatgagggcgacgccgaggaaggagacggaaatggcggcggtcagcgtcttgacgcgctgtttcttcaattccgcaagggcgtcttcggtactttcaatgtgcaggctcatgcagtaagggaggttcctgagaataatataacgttttttccggttggggcgagtgcaaagatgttaatattcctctggtctgcatgatgaccagatatgaataaaacggtgttttatggtgagcggtttacgagttttatggcagtcgtccgggctggggaggagcgtttcctggttttgtttgcgggccggagcatgggctgtcccgggtgcggatgaagaaggctggggaatacggaaggaatgtcccgcatgttcaggcgcgtgttttccctgcacaggctgaccatggaaaaagccggatgccgttcgttttgcgaaaaaagccctgccatgggctgcatggcagggcggaaagggaatgatcctttaaggcaggaaagggaatcaatagtggccgtggcgcggaccggtcatccacttccaggctgtttccacgatggctccggcgtccttgcagcgggcttcccagccgaggatttccctggccttcttgggattggcaatcaggcggggcgggtcgccttcgcggcgcggaccgtagcggacggggattttcctgccggtgactttttcagccgtttccaggatttcccggacggaaagccccaggccggttcccagattgaagcattccgtggagccgcccttcatcaggtagtccaccgctctcaggtgggcgtccgccaggtcgttgacgtggatgtagtcgcggatgcaggtgccgtccggcgtatcgtaatccgtgccgaagacttcgatgtattccttttccccggtcagcgtgagcaggatgttggggatgaggtgggtttccgggtcgtggtcttcaccgatcaggccgtcctcgctgcagccggaggcattgaaatagcgcaggaaaacgctcttgaggccccaggcgcggtcgcaatccttgcagaccttttccagcatgtacttggagctgccgtaaggattgattggatcctgcttttccgtttccgggatcggaatctgggtggggacgccgtacgtggcgcaggtggaggagaagacgaagcgcttgacgccggcggcctgcatggctcccaggaggacgaggggacgggcgatgttgttcatgtagtacttgagggggtcctggacggactctcccacgttgatgaaggcggcaaagtgaatcacggcgtcaaagccgcccttcatcaggaggggatacacgacggaggcgtctcccaggtcgcccttgaccagtttcacctccgggtccacgagggctccgatgtggccgtacaccatgttgtccagcacagtcacgtcagcgccgattttgacgagctggcgcaccgtgtgggaaccaatatatccggcgccgccggttacaagtactttcatgatcttatcaaattgctgttgggccggttcaaccttttctccggcaagggtgtccgtacgcgccggaacctgcggaaacttccggtttgcggcaggctgcgtcactgttctggacacctgtaaaagtgacatgttttcccctttttgtcaatttgtgatacgtctgccgccgctcatgcgcaggatgccggacgcatggggcggcaacgctcccgttccggtgcgcaaggggcaaggctcctttgcatggtccgggcgctttcctctggcggcgtgcgggccgcctccgttttcatgccggaaactgccccgctttttactggctcctgatgtgcatttttgagaacatccccttattatgaaaccgtccgagatcaggaatgttctggaagatcacgaagtgcgccccagcaaatccctgggacagaacttcctgacggatgaaaatgtggcgcgctggattgtgggccagcttgaaattcagccacaggactgcgtggtggaagtagggcccggaaccggagccctgacggagcacgccgcccctctttgccgcaaattgattctggtggaattcgactcccgcctggcggaataccagaaagagcgctgggccggagacccccatgtggaggttcaccatgcggacggcgcgtcctgggacccgcggggattgtttgcggaagctcccgtcaagttcctgggcaaccttccctattccgcgggaggcgccattctccagaacttcctgtccaggcccagcgccgtggaacgggccgtggtgatgctccagaaggaattcatcgaccgcattctggcgactccggatgacgacgccttcgggctgttgtccctgcgcatccagaaaaactggattccccgcgccctgaaaactattcccccggaagcgttccatccccggccccggattgattccaccgtgatgctgctcacgccgcgccccgtccgcgacctgcccccgtatgacgaccggctgatggacgagctgatgcgcaaggctttctcccagaggcgcaagcagttgaaaaaacagcttccggcgtcccctccgtgggaggaagtagccgcctccctgggactttccccttccgccagggccgaggaactgaatttggcccagtgggtggagctggcgcgggcttacgacgccaaccccctcaaggacgtggcgcagagcggggacgaattgtttgacgtggtggacgaactcaaccagatgacggggcagggcacgcgccgggaaatccatgaagggaaccttctccaccgcgccgtgcacatgttcctggtcaacaagcatggggctgtgctcctccagaaaagatcgctgtggaaggacaggcagccgggcaagtgggattcctccgctgccgggcatctggatgccggggaaagctatggggaggccgcggcgcgggagctgaaggaggaactgggcatctccggctgcgagctgcggaaaattgcggactttgacgcaggtgaaaacaacggctgggaattcatcgcgctctatgaagggcggtactccgggaaagttcgttttcccgcggcggaagtggatagcgtgcagtggtttacgccggaacaaatccaggcatgggtggagcgtcgcccgcaggacttctcccccgcgttcattccgtgctggaatgcatggctggccgcgaacaaaaaggcatcattctaactcaaatacatatcatgattaaccctgatcaattatctccggagcaggtccggtccatccgggactgggcggaagaagggctggatttaaacgccatccagaagaggctgcatgaagacctgggcatcaagctgacattcatggataccaggttcctgcttcaggacctggatattcaaatcaggcagccggaaccggaaccccaggccgagcagccggcggagctttccggagcggcggctccccccgcctctctgctgggtaaaacccaggtaaccgtggatgagataacgcctccccatgccctgatggccggcaagattctgttcaggagcggagcccagggcgtgtgggacatcgaccgcacgggccgcatcaactgggacgccacgctcggggaacccacggcggatgacctgaggggatttgaaacggagctgcaatccgtcatccgcagccgcatgggcgccatgtagggaaaacagcaggcatccctgtggaaatggaacggagcagcaacccggaacatcagccatgttgcgataaaaaaaccgggagggaatcgaaagtgagatgacggtaaataagccgcaatgaaaatgaaattcaagataacaagcgatttaaggcaggcaaaaaacatcggggcggctataaaaaaatgccttaatgaaatcggtgtgttcaccttggctgatcttgagaaaatgacttccgttgaggcatttaaaaaaatatgcggtaactatcctgacaagacggtgcctgtatgttattacctgtattctctggaaggggcgttgctgaacttgcactggaatgacactccctctgaattgaaagaagaattaaaggcaaaaatcgaggattgatcattggaatcaaattattgaaaaattaatattacctttacggagccggcatcctggcagcgcaattcaggggcggacaggggaaaattctcctgaacttcgttagggtaatccaaacagcagaaggaaaatcttatggaaataccggatgaaatgattgaaacgctggtgcctgccgtgcgggagcagctggaagcgccggacactgcctatgtcaaggcctgcctggagcgcctgacgggccgggaaaaactggaagagcaggaagccctggaactgatggcgcaggcccttgccatcaccattaatgagatggtggtgggcggccgcccctttgattcgggaaagtacaaggcgcttttgaaagatttgccggcccttccggatgaggctccgtgataaatctcgacaatctccggaattgattcataatcctttctttcacttgaaattttatggcaaaaaaaccattagaaacaggtgctccggaagcgtccgcagccaaaaaaacggctgcccgcaaaacggctgccaaaaagacggcctctacgaccaagaaggccgccgcggctgaaaagaagcccgctgctgacgccgcttccgtagaagcgcccaaaatcaaaacggtcaagtccgccccgaaaaccgcggccaaggcaaaaaccgtgaaacccgccaaaaaggcggctgacaagaaggcccccgccgctgaagcgccggctccttccgtgactccggctcccgccgctcccgttgaaaaaaataccgctctcgaggcttcccaaaggccccaggctgccgctccggtcaaggtcaagcgcgaatccttccgccccaaccgcaacccggaacagcaggaacgccatgaacagcatggcggagactcctttgcccagccggaaaccgtgggcggagcttctgaaggttccttcaacaagcgcaagcgccgccgccgcaataaaaagggcaacggctcagaagaccgccagcccatgcaggactccgcttccttcaagcagctggatggcaagaaagtggcctcccgcgcctggaaaatgttcctggcggaagtgtctgaagaagggcttgccctgatggacgaccagacggcgcgtgaagccgcgcgccgcgccttccgctgcgcggaattcttcatgatggaagaatcccgccgcaagcacgcccagaaggccgccccccagcagcaggaaaaagcttcctctccggaggaagaccgtgattccgaagaggattccggcgaagaataatcccggcctgttccgtttttgccctgcggcttgtgccgcggggcttttttatgcccttgggaaagacctctgaaaggtggcggtgctctcctaggaaaggccgttccggaaatgcgctggcgtcgttttcccctgatttgaagaatggaaaacccctgtttcacgcttaaaggttcttcctgaatgggagcgaatcggtctattcttccggcgtctgtgaatggctggacttttttatccgggacatggatgagggaaacgggttgaacccggtttgcttgactggggcgggatggacactcctccatccatgccgctctcatcaaggaacgtcatgggcaggatggatgccgccgccttttacggtggaaaaaagcagggaagggttgcgtttttgccgtattcctgtttataccttcttgccgcgccattttccgctcttcaggtaccaccacgccagtgctatcagggcaatgccgtaaacgtgttcggagaaccagcagagagccacgtcaggcttgagcctgatgacgatgtaataaacggcggcggtgtaaacagtcagggaaatcatctccatgatgaagcccgccttcgtgttgcccgtgccggatacggcattaaacaggatgaatgccggagccatgatcagggtggaggtggacatcacataaacggaattaatgctggcggcaatcagggacggattatccgtgaaaactctgagaacgggttccgggaacaggcacaggataacaagcagcggaaccaggatggcatacgtcaggttaagcgtcatcccgcaggttctgaacagatagcgctgttcccccgcgccgatctggttgctgatgagggcccccgccgtggtggcgaaggcgctgatcaccatgatgagcagcgcggaaatattgcgcacgatgttggtcacggccagggggcgttcccccaggtgttcaatcgccaggaaaaagatgaaccagatggagacggaaatgaaggactgcaccatggtccagccggaaatggacagcatgcctttcagcagatggggacggaacgtgaacgcccggcggaagccgtacttccgcttgtctgccgtcgtgcccgtgtaaatgatgaaaaagaggagggaaacggcctccgacacgctggaggcaatggccgccccggcgatgcccatgacgggaaagccgcctttcccgaaaatgaggcagtaattcagcaccacgttgctcaggagcatcacgacggaattgatcgtcagaatcttcgtttgggtaatccccacgtaataagcgcggaacatcacgcagaggaaggagaaaaagatgccgtaggtgcgccagtgcaggtaatccgccgtggcgtcgtaaacctgcggggactcgatgatatcccgcaggatgatgggcgaaaaatattgggaggcggtgaacagaaccaccgccagggccagcatgaaataacaaccctggatcatggtgggtccaatgcggttgtaacggcgttccccgttgcggcgcgcaatgatgatttgcgccccgaatccgaagccgaaagccagcatgaacatggccatgtaatacacgccgcccagggcgcacgctcccagcgccacatcccccacgcggcccaggaaaatggcgtccgtcaggccgatcatgtgctcaatgatcaggctgatcatgaggggatacgacatgagccatatcttttgataggaaataaaggagggattattcataacaagggcgtcccgcgggcatgatctgccgggagcaggcgctaaaggtccggcattcttgactcaaaccgttttcatgcaagaaagaaatgcgtttgtctccgtgcatgtcatgaaaaacggagaaaaaccgcgggtcagctgaggggaagcctggtctccggataccgcagcggagacttgctgggctgtttcatgaacgccagcacgaatgccaccatgcccacgcggcccacgatcatgttaaacacgataatccatttgcccgcatcgctgagttccggcgtgacgttccaggaaaaacctaccgtggcgaaggagctgaccacctcgaaaaacaggcgttccaggctcagtcccggttccgcaaaacacatgaccgtggtcatcatgcctacccaggccccggccaggataacggtgatgacggcgcgctccaccacgctgcgggcaatccggcgcttgtgcatcaccacgtcctgcttgccctgcaagatgcgcgccacctccccgcaggaaacggcgaacgcggtggtatggacgccccccgtcgtggaaccgggattgccgccgatgaacatgagcgcccccaggaacagggcgtacgggacgctgttgagcgccatgtctgaaatattgaacccggcggtgcgcgccgtggcgttgaacaggctttcccacagaatccagtaccaaggatcggcagaagtgaacaggctgccgtcaatcgccttgatcaggaacaggatcaatccgccgcccagcaccagcgcggcggtcatgcgcacgaccagccagctgtacgtggaccagtggcggctgatagtgttccggctgtcccagcccagggccaccctggcgcggcggacgatctccaggtacatcgcaaaccccaggctgccgcagagcaccatcaccatgatggtaatctggccgcccatattgtaggccacatccggcgtagccaggttgtccgcaaacaggctgaaccctgcgttgcagaagccggaaacggaatggaacacggcgtaccaccagagcgtgtccccctccagccccggtacgttcctccaggaaaaataaagggctatggctcccagtgcctccaccccgaacgtgacggcaatgatgttcttgatgaaccggtccacctgggcgatgccctcttcatccagcaggttgctgatggtcaccttggaacgcaggctcaggccctggcccaccatcagggagacgaaataagtgaacgtcatgatgccgaaagcgcctacctggaaaagcaccagcaaaatggtctgcccgtaattggtgaaatgctcatggacgttcaggggcacgagccccgtgacgcagacggcgctggtgctgatgaaataggcgtccgtaggggaaagaatgatgccgtccttggtagcgccgggcgacatgaggagggttccccccagcgtaatgaaggcaatcagcgtgagcaggaaaagcagggccgggcggatgcgcggcaggtggaacccccggttccggcgggccaggcggaaaaaatactccttcaggttcagcaggggagccgctccgtagcagaggcagagggcgcggaaaatattctgaagctctattctggaaataaaggtggaattgaaaaaattcccggccagcatgaccaggataaggaggcccagccccagttccatccaccgcgggttccggatggacttggcaagccacttttcccgcaggatgccgagaactccggtaagctggccgagcaccagcagggacaggatttcccggaaataacgcagggaaagctggtcctcatgaatttctccgaaaccgttccaccacagcagccacatcagggcggccagcgtacacaggccgaaccccatttccatgacctcaaaacggttcaatagcggtttttccctcgtctcattcacaagcctgaaatggtggtgcctctgatgctgaggggagactactgcatacggaaggatttgagaagcccttatatcgtttccatgccgtcccggttgccggggggaaagaggccctggaaaatattttctttcatgtgcaggaaaatagttgccaatccgccgccgctgtgcataataacccccgttcttaccaaaccatgtgcgctcgtggcggaattggtagacgcgctagattcaggttctagtgggggttcccccgtgaaggttcgagtcctttcgggcgcaccaaacaaggccgtgcaagttaactgcttgcacggccttactggtttcttgaggatagcggtttccattcaaaatggcatcaggtgcgggaaaacggggcatttttttgcaaatgacgggagtggtgctgcgaggaaagctgcgcccgcggggaatgaacgcggagcgcctcagtattgtcttgcagtcaatagagaaattaaaatcccatgttccccgttaaatgttttttcttttccgcttccgttgttttattcctcatgtgcgcgtttgctccggccgggcgtgcggaggcgaagattgaggacgtcgcctcgttcaagggggcgcaggtgaccggagtaacggtgtcggacaagggcaggatttttgtcaattttccccgctggcgggagcagattccgtgctccgtggcggaggtccgcaaggacggcagctataccccttatccggatgagaaaaccaaccggtgggagaagggaatgcccggagacggagatgcgtttgtgtgcgtgcagtccgtggttgcggacggagacaggctttatgtgattgatacgaagaatcccatgatcggcaagactgtcgccgttcctgcattgtacgtgtatgacctcaatacggacaagcttgtcaggaagtatcccctggcggaatccaccagcccggattcctatgttaatgacctgcgcgtggaccgtgagcatggcaaaatttattttacggattccaacgatccggggttgatcgtcctggacatgaagagcggagagaattatcgaatgctggaccatcacccctatacgacggcggaacaggaccatgtcaccgttgaggggaagaggcatgacggaaaagtccatgccgacgggattgccctggaccggaagaacggcatcctgtatttccacgccctgacgggtaaaaccctgtatggaatacccacccgccaactgattgaccggaaggtggatgaaagcaggattttttccatgaaaacgccttccccggacggcatgatcatggacgaccggggcaacctttacatgggggacctggaagagaaccgcattgtctatctcactccggaccgcaaggagatcaaggttctggcttccggggacggaatcagctggccggacacgttcagcattcatgacgggtacctgtatttcaccaattcccgcattcaggaagccagcggggatatttccaagatggagtttacgctgaaaagggtgaagctgccggaataagcggcctgggcggagcggaggatggctgagcctccggcatctgtgccgtgaaaccgcttgcgccctgccgccctccgccggaaccgcgacgtggcttgcccctgttccggaggtattcttcatcttcctttacatgacaggcgccccgggctacagtccccgcgtttttcaggaaggcaatgattcttttcaactgtgactacagtgaaggcgcccatgcggatattctccgcaggctggcggaaacgaatatggaacagacagccgggtatggggaggacccctattgcgaccgggcccgggagctgatcgctaatttgtgcggcagaacggacctggacattcatttcctcattggaggaacccagaccaatttcacggtgattgcggcggccttgcgcccccatcaatgcgtgctgtgcgcggatgcgggccatatcaacgtccatgagtcgggagcggtggaggcgtgcggccacaaggtttccgccattccatccctggacgggaagctgacggcccggcagattgaggatgcgtggcacgcccattgggacgacgaaacccatgaacacatgcctcagccccggatggtttatatttcccagccgacggagctggggaccatttattcccggagggaacttcaggagatttccgaagtctgccgccgccgggggctgtacctgtatatggacggcgcgcgcctcggctacggcttgtgcgatgaaggcaatgatctggatctgccggcaattgcctccctctgcgacgccttttacatcggcggcacgaaggtcggcgccctgttcggggaagccctggtgctgcgccatgatgccctgaaggaggatttccgctacattgccaagcagaagggcggccggctcgcgaaagggaggcttctgggcatccagtttctggagctgttccgtgacggcctttatttccgcctgggggcccacgcggaccgtctggccgtgatgctccgggatttctgccgcgccaggggactggcgctccccgttgccagcgggacgaaccagcagttcgtcacgatgcccgattacgtcctggatgagttggggaagaagtacggctttgcctacctgcgccgggaggacccctcccacagtaccgtgcgtttctgcacgagctgggccacgcgggaggaagacgtgcgggagttgatggcagatatcggccgtttgtgctgaggtgttcccgtttccggggagcgccggggtacctgcaccgggtttcattgtctgcgggggcagggggaagatcgttctccggctcatccctgggaagcggtattgagctttccggaatgcggaagggcggggatggcacggatatgtccttgaccgtgcagcaaccatggccggggggacgcgtcctccgcccggcatggaataaattttccggaaggatgctccggctgcgattttggctgtaaaaggctttttcatggtgtataggtggcttctgttgaaacagaggcgttccgtacgccgtactatcatagccatggaacccttactctctcccgacagcaaacgcatttatgtggtggacgccctgcgcggttttgccgtgatggcaatcatgctgctgcattttctggaacatttcatctacaattcctatcccgtggcttcctccccggtgatggaggcggccaaccagcagttcaaggacgcttttttcttcctgtttgccggaaagtcctacaccattttcgccctgttgttcgggttcacctttgccatccagtaccgcaaccaggcccggaagggccgtgactttgcgggcaggtttgtctggcgcatgtgcctgctggcggtgttcgcctgcatgaatgcggtgttttttccgggcggagacgtgctgctgaccttcgccatcgcagggctgctcctggtgccgtgccgccggctgaagacttccactctggtggtattatccctgttcttcctggcccagcccctggaatgggcgtatgcggcagcgcagtgggtgagtccggcctgggcgcctccctccctggctgttgcggaatcgtacgctgccctgaaaacggctgtggatacgggcaatttctggctgatggcgtgggagaacctgacggtggggcagtgggcaagcctggcctggggcattgaggcggggcgcctgatgcaggctccgggactgtttctgctggggttcgtgctggggcggcaggatttctttttgcagaatgaccggaatgccatgttctggacccgggggatgcttctttccctggccggagccgtggcgttttatgtggtgatgtccctgccggatttgcctgccccggtgcacaccgtgttcaccatgtggcacaatgtctgctttaccggcgtgtgggtagccgggttcgtcctgctgtaccggctggaatatttcaggaaagtgacggttcctctgctgacttatggacgcatgagcctgaccaactatgtctcccagtctctgataggctccctgattttcttcccgtacgcgctggggctggctccttattgcgggtatctggccagctttacaatcggctgcgccgccatggccgggcagatatggttctgccgctggtggctggagcggcaccgttacggggtgctggaagggctgtggcaccgggcaacctggctgggcgccggaaaggcggccaagccggaagcccggtagaaacggtgattttctccggtacaggttattttgccggtacctggtcgtaaaagacgagggacgctttttccagcgtgtgctgccagagctggaagcctacctgggcggccggggtatccggagccacgggcagcgatgccgtatccagcgcataaacggtgaccaggtacaggtgccacccgtggcccgggggagggaagctgccgctgtagcccgcgaatccggcgtcattgcgaatttggaccgcctgctccggcatcaggcgggtggccggatttccggcatccgcgtgcagttccctgacggaggcgggaatgttgacggccagccagtgccagaatccgcttccggtaggcgcgtcccggtcatggatggtaacggcaaagctttttgttccttccggcggattggtccagaagagctcgggggactgattgccgccgcctatgctggtgtgccggtggacaggcgtggcaacgccgcccaggtccttgctgtggagtgtaaatgatgaaggcataaggtcaggattttatttcagtgttgttcgttcaaaatgaggggaagggttcaggagattgtgtggaggggcttgctgccgggctgtccggcggctttctcccggatgctccagattcattccttgttgattttttccttccagtcgtgttcggttggttccctggtacgggaaagggtgccgttccagatggcgctttcctttgaaagggagatgtagtattgcgtggcgtatggaagggcggacggacatcggcggctttttcggcctggaattgccggaatacggcaatttccctcagtggcatcccggccggagcgtggccgtgaattccggcaggcgcgctttggagtatatcctgcgccgcctggggggcgtgcgccgtgtccacgtgcccctttatacgtgcggaacggtgctggaaccgatggaacggcttcacattcccgttattccttaccgcattgacgggcatctggagccggaagaattgccggagctggaggaaggagaattcctgctgtatacaaactacttcggcatcaaggagaagtacgtggaccggctggcctcccggtatggcggcaggctggttgtggacaatgcgctggccttgtattctcccgcccgtcccggcgtggcgtccctgtacagtccgcgcaagttttccggccttccggacgggggaatcgccgtcatggacgcagaccagccgctgccggaaccggaggaacgggatgagtctctgccggatgccgcctttctgctgggatgcctggaacgtgggccggaaagggcttccgccgcctgcggacggaacgaacggaggctggaaaacgcccccctgcggaaaatgtcccgtctgacggagcggttaatgcgcggaattgattacgagcaggcgcgattgcgccgcatggacaatttcctgtttctgcacgaaaggctgggacatctgaaccgcctttccgtggagccggattccttgtccgctccattttgctatccgttttggacggcttttcccgagctgaggaatgtgctgattgatgaacgcatcctggttcccctgctgtggccggaggtgctggaacaggccccggagggcagcctggaacggaagctggcgctgcatcttctgccgcttcccgtggaccagcgctgcgggccgcaggacatggagcgcgtcgtccggaccgtggagaatttttattcctgaaacaaggaggaactattttgttagagcggcaataagacgttgacggtgtgaatggaatgctctaacatttttgaatgtccgactatctctcttctctgggctatcctttccgtggaaggcccatggtttttgcctttgccgtcctcattgtatgggccatgttcctggcggcctgggcgcccctcatcggctggattgccattttttgtttcctgcaaccgttcatgtgcgcctttttcatgaagatggtgcagcggtccgccatgggggaggaggaaatctgcctctttccggagttggaggaatggctggacgatctgatgatgccttacatccggctggtgatgtgcatggcagtctccttcctgcctctggtcatttatctgggagtgatggactgggacatggacagcccccttatctggctgttcattgcggcgggtgcagcttatttcccgggcgttttcatgaggacttccgtgctggaaagtttttccgggctttctcccgcgggctggtgggggcttgtcagaaaggcgcctcttccctatgccgggctgctcggcgccatctgcgcggggggatgggtgattctgagccttccttccgggtttctgatggattttgccatggcgcccgtgaagctgtatgtcgcctgcgtgctgatgaacatgtgcggcttgttcatgctcaagcatgaatttgccggggaagaggaggagggcggtttttccatctccggtcccgccgcttcatgactgccgccgttccggcagcgccggggaaagtgaggcttatttggcagactccctgtccagattgaggatgcccagcacggacatgttcccttccgcatccttgccggagggaaggtagaccttggcattgttcagcatgttttcaaaggccttggcgcggagcacgttcggccccatggccttttccttcagcgccagacccgccgcttccgccctggcggcttccagggaagcttccgcgcgcgctttcccctgcatgacgatgactttggcttccgcctcgccgcgtgccagattagcgttcgcttcctggcgcgctatttccattttcatggctccttccgcctccccgcgtgcgcgctggatggcgatgtccttccgggcgatttgcagctccgtctccttccgttcattttcctgggtggtctgcactttcttcacgacggattcaatgatggcctgcggaggattggtttctcccacggctacggaatccacgatgaagggggtgccgtccagtcgcttgctcaactgcgtgtaaacgttgtcggaaatcttttgcaggctgccggaggcgtccagggcgttgtactggctcaattccgcccgtacggcggtgcggaagggctgctggatgaaattcttgtaggcaaacagcatgatctcgtccgccacttcgtcgtcattgcggccggagctctgcgcgatgccgccgtaatcctccatgaattccttcactcgggacgggtccaggcggtaaaccagggaggccttgcaggagatgggcagtttgtccttgcccaggatggcgccgccgttgcgggcatcgaattcctccaccgtggtatccggcgtgatggaaaccttgctgacttccctccgccatacccatcccgtggaggatggcccgatcaggatgccctcaaacttgttctggccgaaaatgggcttggaatagacgtagccggcaaaaccggacagcacgcgcttgttgctgaaattgtaaaaggagaaggccgccgcacccgcagcaatgatgacaatggcgggaatgagcagggaaaggaaagttctgggagttttattcatgagagagtagtggttgtgacggtttccaacataaaaggcacccggtgaaaatcaagttctctttttccgtccggccgcaggggaaattccggtgaagagcgcgtttcaggaaaaggaaggcggcaaagtatgtcctccgctgaacggaggagagaggtggaaatgtcttatccggtaaaggttgtccgttcccgtgcgggatatttccagcagtgttccggagcgccctccgcggagacgggccgccatctgatttacagtcatgaatgtagccattacgggttccagcggatttataggcagccacttgtccagccgtcttgcggtgttcgggcatcaggtgacgcctttgtggcgctatctgttcacgcaggacagcgtggattgcctggcggaggctctggcgggatgccgcgctgtcatcaatctggccggggcgcccatcgaccggcggtggacggacgcttacaagcaggaactggtggagagccgcattatgaccacccgcaagctggtggaagcggtcaatcgcctgcacgaacctccggaagtgatgatttccacttccgccgtcgggtattacagcccggccggcggctgccatggcgaacaggacgatccggcggcggattcctttctggcggaattgtgcgtggcctgggaaaaggaggcggaactggtgaacgactccgtgcggctggtccgcacccggtttggcgtagtcctttccccggatgggggagcgctccccagaatggtgcgcccggcccggttcggcatcacggcggcggtagggaacccggaccatcccttttcctgggtggcgctggaggacctggtggatgccctgattttcatcatggggaaggaggacatttccggcccggtcaatgtaacggctccggaacgcaccaccaaccgggaattttacaaggctgccgcagaacatttccacacccgcctgtccatccatgttccggacgccgtcctgcgcctgctgatgggggaagcctcccaggtgattaccaacgggcagtgcgccattccggagacgctgatgcgggagggatttgagtttcaatatccggatatccgcaccttttttaacaaagcattccctgtcaaatcatgagtatcatacagaccatcgttacttccctgtttcacggccattccgtcaaaaccgaccccatgccggatttcaatctggaacgttatctgggggaatggcacgaaatcgcgcgcctggaaaattggtttgagcgcgggcttcgcaaggtgcttgcccggtatgaccatggagagaacggtaccatttccgttaccaacagcggttatgacgtccgtaccggggaacggaaggaggctcatgcgaaggctgtggtgggagacgcccccaatcatttgaaagtgtacttcgtgccgctggtgtacggccggtatgaagtggcctttctggatgaggattacagccgcgccgtggtttccggcggttccctgaattacctgtggctgctggcccggacgccgcagttgagggatgaagagcttcagccgatgctccattgcgcggaggaactggggtatgatacctcccagctgatttactccaattccctggcttccacggataatggcattgggcgggatctgtgagggataccgttcttgaaatgggagtgcggggtagggataacggctttatggaagagccaagctcctttgtggaaaaacgcctccgcttcgcttggcagtgaaggccgggaggccttcattcccagggatgtttttacccagtccgggggaaggcgtattttctccgtgtttcccgctgggcatccgccgggaacaagggccttccggcccttgtaaaaaatgcctccgctgtattccggaacaggttcatccatgaaggctgcccggccgtaaagcggtttcatggcccttgtcaggaatttcccgtaagcgcccccatgggctccttcctttcttcattctcctgctttcaagctcttccctccagcgggcccgtctccatgcacataatttaaaaaacgcagccattcgttgaaaagcgcttgcaatcgggcggcggatggctatgttctcattcatccaaacattggatgtttggatgaattacttaaagaaggagtaacaatggatattattcatgacaacgccgctgatctcagcgcattgaacggcaagaccgttgccgtgatcggatatggcgcccagggccgcgcccaggcactttgcatgcgtgactccggtgtgaacgtgattatcggcgttcgccccggcaagtcttttgacgccgccacccaggacgggttccaggtgatgaccgtagcggaagccgcggacaaggcggacatcatccacattctgctgccggatgaaagccacggctccgtgtatgaagctgaaatcaagccccacctgaaggccggcaagacgctttgctgctcccacggctttgcctacgtgttcaacaccatcgtcccccccgcggacgtggacgtgatcatggtggctcccaagggaccgggcacggaagtgcgccgcgtgtttgaagaaggcttcggctgccccggcctcatcgccgtgcaccagaatccctccggcaaggcccgcgacgtggctctcgccatggccaaggctgagggcctgacccgcggcggcgtgctggaatgcaccatggcccaggaaacgtacgaagacctgttcggcgaacagaacgtgctgtgcggcggcctggtggacctgatgaaatacggctttgaaaccctgacggaagccggttatccgccggaaatggcctactttgaatgcgtgcatgaagccaagctcatcgtggacctgatttacaacggcggcatccagaaaatgaactccgtgatttccaacaccgctgaattcggcgagtactacaacggccctcagattctgcccgccgacgtgaaggaacgcatgaaggaatctctcaagcgcattgaatccggcaagttcgccaaggactggctggaagaagccgccaagggtgctcccaacctcaaggccaagcgcgaagccctgggccagcacccggtggaaatcgtgggcgccaagattcgcagcctgtttgaaagaaactaaggtttcttttacgttgattacgggccgttccgccgtatcccggaggaacggcccggacactcccgggctttccgcggaagcccgctattttttcagtttatggacaattccttgccggccgtcaatgtggagaatgccagggtatacctgggcggccacgaaatcctgcacaatatttcctggcaggtgcagcgcggagaacgctgcttcatcctgggcgcgaacggcgccggaaagacgacgctggtcaaggtgctgatggggtttgcatggcctctcttcggcgccagagtacaggtgctgggcaagaccttcgggcacgtgaatctgctggaactgcgcaagtccatcgcgtgggtgagcccgttcatgcacaaatggctggaggacggcgcctggaacgggcgcgacatggtgctttccggccctgacggcactattggccttctgcgggagccgacgccggaagaggaagagaaagccgccgggatcatgaaatccctgaaggcgcagcatttgatggacaggcccgtggtggccatgtcttccggagaacaggtcaaggtgctcattgcacgggcgctgatgacgaacccggagctgatgatcctggacgaacccagcgtttacctggacctggcgggacgcgaatttttactgaaaaccattgaggaactggcggagacgcggcctgacctgaccatcgtgttcattacccagcgtattgaagacatcctccccgtattcaaccgcggcatgattttaaagtccggtgagatcgtggcccacggaagccgggacgaggtgttgacggaggaaaatctaaaggacgcctttgaactggatatccagttgatcaagacggagaagggacgcctctggactgttattcgctaacttttcatgaagaaatccaagacaatggagttgaagaagcctgtaagagtgtccctgtcccgccaggtgctcaccgccatggaatccatgatacggtccggcaagtggaaggtgggggaccgcattcccgcggaggcggaactggcccgggctttttccgtcagccacaacaccatccgcgaggcccttcaatccctgattcacatggggatgctggaggcccggcccggcgacggcacgtatgtgatggcatcagaccgctttgccgttgcggtgagtaaccgcctcaaggaatccgaactgccccagattctggaagcgcggctggctttggaaaaggagattgcgcggctggccgccgttaaaaggacggaggaggatttgaaggagctggaaagcgccctgaaggactgccatgccagggtaaggccgggcattgaggacgacatgctgtttcacgccgccgtggcccgcgccacgcataacccggtgcttgcggaattgtacaacgtggtgatccgccatgtgcaggagaatctggaaggcctgctgcaggagaagcagtatgacgccggggccatgaagctgcatgacgacctgctggatgccatccggcagcgggaggcggacacggcggaaaacattattgtgaagatcgtggagtttgatacggtcagcataggcggccaattcagcgcctgatattcgggtgttgggatgcttgaaccggcagtttgtccggtaaccggaacgttccggcgtcctccgcatggcggaagccgccgttttttgcggaaaagagaatggcgttccgggaaaaagaggggaaatagcttggtaattcatggagtacgattagtattttcaactttttctttacatcttcaaataaataaattacccggataaggcaacgatatgccaacttcccctccttaccatgttgtctctatttcaaatatgttctatcggcctgatattgatgggccactggtttggcgcttttgcccaggccggagaagatgttcctgatgaagtacaggcgctggaaataaaatcggaaacgacgttgtgttctgccgatttctatattgccaaagagcagggaaaggatgtggatgagaagacggacaaggagcgcaaaaaactcggcatgggggaagatgttttgttgactttgaccggaaagcccaagggggatgtttctcagttgcagtggaagattaccaaaggagaagctcttgcctctcttcccgaaaaaaccgaggggctcgaagaggttacattgacggtgaataagagaatacaaaagaagggagaggtggaagtcaccgtcaccacgagtgaaggcctggaaaaaaccattgcctttgagattcttgtaccgacaaagctgacggcagttgttcccgtcaaggccgatcttcccagtgatcacgatatcattattgtggctgctgatgttaaattgacggtggaacctacggaggtgaattttggaaatatccaactgattgaacgcgatggaggattgacctatgtcatgccgacccctcctcccgatccgcaaaaacatgaaataaaattgggcgtcccgcatacggagcatggatgcgatgaccccaggagcattgaacaaaataattcattcattgaccgggtgatatatatggcaaattataacgccatacatggagctaagttgccgcaggaatggttttggacttgcgattggaaagtccatgatgggaaaggcggcaaagagtcgaccagtgacgatatcctcaaagtggaaaccgtggagcagaggttcaaggttgagtatgtgaaattcgaaggaatggatggagaatttgaagaaatccaaattgccatcaggaaattcggtcgcgccatatcctatgatttatgctatcatctaatgaattatgaatatgtttggaaataatccaatgaaagtgtttacctttctcgccatgctatgctgtatggtagggctgggacatgccctgccttccccggtgtgcctggacccgtttaaatctccccctgcggagctgtccggcttgcgggagaagctggcgcaagggcggctgggggagttttatacagaggcacgctccgtgctgggccaatgcgcttctgttagcaataagcagatcacgcgggaggagctggcgttgcagctctggctgttctattatatcgcggaaactcccctttatcccgccgactacgacaaggcgacgccggagagcatttttgacaataatgatcatgccgtcaaacatgacatgttttccttcctctacgtgatgagccgtgacgcctctccgatggcgcgccgcctccatctccggggcaagacgctgtccgacttgctggccacttatgcggcttccatctatgcgcagttccggaaccgttacgatccggatttggaggagaagcacgaggctctgaaaaaatcgttcgttccgttaaaccggaagtatttggaagaagaactcaagaaacgtgatatcgtttgcaatgtcaatccccagtattacgtctttctcaacaagctggcagtaaacaatatcaggaataaaaggttaaaaaattatatttccgttcccagaatgaagtattttgtggaaatgctggtgaacctgtttccgggtcaaagcggggcggtaaagaactacctccggatggcgggctatgcggacaaggaaatcccggacttgatcaaccggacggtggggcgtactccggccacggaatttttgtacaagggaatgcctagggatgcgcagaaggtaaagccgtgaagcaggacaaacgcttaaggacagcagtttcccaaggcagacggaatttcctttccggacaacttaaagccgtctatcccttattcccggaaaaacggtatttttgtggaggatggagagaccggtaacgctgtgatttttatgcttttctgaacataaaagtttgttagaattccgggcatgactacccctgttgaattgaagtgtccgatgtgcggcgcgttgctggcgatggaagatgtgaatatggccacggatatggctttatgccgcgcctgcaacaagataagcaggttttcagagcttgttcaggaggaaagggatgaggaaatccttgattccattccccggcgcatgagcgtgacaaaaacggcacggggattggaagtaacgtacaggaagcccaagggagccggatttttcctgttgctgtttgcactgatttggaatgctattacatacgccgccatatttgtgatgatggggaaaatggcccatgagagtttattcgggcaattgttcctgattcctttcgttctggtcgggttcggtacgtttttgggcgccgtttatgtgttgttcggccgtatgacgctgaccctgtcgcccggaacgggagagctgttccgcggggttgggagcctgggccgccgccagcagtttcttctggcgaaggattcccgcatttccattgaggcgagtaatatacagcagaataataaggtgctgaacaagattgtagtggaacaaccggacggcaagccgttcgagttcggtacaggtattgcggagaaggaagcccagcagtatgtggcggcccttctgcggcagatgagagggtagggctgctgttccggattcccaggaaaggtgaaggaatgacagggggagccggcctttattgccgccggattggaaacgccttgatggagctgtttctccggcagcaggggggcgtctgtccgtgggagcggcgcggaaggaaaggcttcgtatccatttccgggaaataattggatgggcaaatcgtcctgtttttagcaaattcgttgctaaagagtcatggatgccgcttgcaggattgccccggaaatttcagaattaatattttgattgatatggaaggcaagccgcgtaaattaaactatgatgaagaaagcgcatctattgttgattctgtgcagtttgctttgcggggcggcgggggcgcagagccgcccggccactccgccgaacatggtggtcattctggcggacgacctggggtacggggatttgggctgcacggggtccaggcagattaaaacgccttcccttgaccggctggcgaaggagggcgtgttctgctcccgggcgtatgtaacggcgccgatgtgctccccctcccgcatggggctgctgacgggccgttttccgaagcgctacggcattactacgaatcccaatatccaggtggattaccttccggagtcccattacgggctgccccagacggagaagctgattccggagtatttgaagccttgcgggtaccggagcgcggtgttcggcaagtggcatctgggccacacgcaggggtatacgccgccggaacgcggcttcacgcgctggtgggggttcctgggaggttcccggtcttattttcccgtgaagaaggaggctgaaggcctgaatccctccatgattgtgtccaattttacggataagacggatattacctacctgacggacgatattacggacagggcggttgagttcctccaggagtccaacaaggataaaaagccgtttttcatgttcgtttcctacaatgctccccattggcccaacgaagccaaaccggaggacatcgccaaattcaagaacgtgcaggacagggagcgccggatttattgcgccatggtgtatgcgatggacaagggaataggccgcattctggatgccttgaagaagaacggtctggaaaaggacacgattgtcgtgttcctgtcggacaacggcggcgctccggaagcgtcttcctgcaacgctcctttccggggtgccaagaggcagcattttgaggggggcgtacgcgtgcctttcatcatcaggtatccggcggacaagcggctgattcccggaagcgtctgcaagcagcccgtttccaccgtggacctgcttccggccctgctgaaggcaaacggacgtcaaatccccaagaaactggacggcatggatattctggagctggtggcgaacaggggaacgcctgttccgcgcacgttgttctggtgcacggattatacgtccgccgtgctggacggggatatgaagtacctgctggtgccggaccgcgctccgcagttttacagcgttacggatgacccccaggagcagaaggatttatatttttccaggcaccaggatgcggattccctggccaggaagctgggaacgtacctgaccacgacgcccgcgtgccgtttcccggacagcatcagctggtccgccaagctgatgagggagtacgacaaggccaccccggacaaacagcctgaatgaggccgcattgggtctcgccgggggccctgcgctgcggtcaatacgcagcggcgcctgccggcagggtagcggggatgcggaaccgtccctttccgccgcgcggcatggttgccattcccgtggctgcccctatcccgctgcggataaccgggctggatggaggccgggtgggatcaaacgccctggtttggactggaacgttccgttgaccggtacgggacatggttttcatggtcccgttttttcgttaaaaaagcgccttatttcaggcgcttgggttccgcgatgcggaggatatgttcaccgggaagggccagattgcccttgtcccgagcgatcatttcaaaataatgggggtcctgggaaatccagatgaattcgtttttagcctgttccatctgctccctggatttttccagatgcgcctggaggaaggaacgttcatgctccagagagcgcaggtccttccatggcttgaaacacaccagggaaagcagcatggtcaggcacaaggccaggacgatggcaaagaggcggagagccctctggacgatcagggcacgtttctcccggcggatttcaagctccgccaaggtaaaacgatggtaatagcggcgtctccagagcattctttgcagttaaacaaaacatttttgatcataaaatgtggattttgccaccataaactgcgtcatctcccagctcttcttcaattctaaggagctggttgtatttggccatgcggtcggaacggctcagggagccggttttgatttgcccggcattggtcgctacggcaatgtccgcaatggtggcgtcttccgtttccccggagcggtgggagatgatggcggagtatttgttgtccttggccagttccaccgtgtccagcgtctccgtcagggagccgatctggttgaccttcaccagcacggcgttcgccacatggcgggaaatgccctggttcaggaattccacgttcgttacgaagaggtcgtcccccaccaattgggtattgtggcccatggctttggtgagctgttcccagcccagccagtcgttttccgcgcagccgtcctcaatggagatgatggggtattttttctggagctcctggtagtaggccgtcagttcctccgccgttctgccgcggccgtccgatttcttgaagacgtacaggttctgagaagggtcgtagaattcggaggaagccacgtccagggcaatgaagatgtccgtgcccagcgtgtagccggcgcgtttcacggcctgggcgatgcattccagggcgtcatcagcggatttcagggaaggggcaaagccgccttcatcccccacggcggtggacaggccgcggtcgtgcagcacgtccttgagcgcatggaagacttccgcgccgtagcgcagggcttcccggaaggtgggcgcgcccttgggcatgatcatgaattcctggaagtcaatgggggagtccgaatgagcgcctccattgatgatgttcatcatcgggacgggaagcaccttggcgttcgggccgcccaggtatttgaagaggggaagattgagctggatggcggcggccttcgccacggccagggaaacacccaggatggcgttggcccccaggcgggacttgttgggcgtgccgtccaggtcgatcatgattttgtcaatggccggctggagggtggcatcgtgcccggagacttccggcgcgatgatcttgttgatgttttccacggccttgagaacgcccttgccgccgtagcgcttggcgtccccgtccctgagctcccaggcttcatgctccccggtggaggctccgctggggacggatgcgcgtccgatggctcctccggccagggccacgtccacttccacggtgggattgccccgcgaatcgataatttcacggccgcggacgtcgatgatttccagttcgttcatgatcataagattttttattgtcttttttggaccatggaacggcttttttcgttccagggaaccacgtcatgaccgtgaaaattccgggttcaagcgcgaaactgacgcagaacggcggcgatgtattcaagagtctccgggtctgaaatgccgccggaaaagtaaaacggccttccggaaggctggggcacggagatgcggcaatagtccgtcttttcccctcccttgcgctccatcatgatcggggcctgcgcgggaaggagaaaatcccatgtgctccccaccggaccaatgccccggaaaagagacgctttacccggttccacccggagaacggcttttcccagcatcatgtcaacgcagaggaagatgatgaaggcttccgtgacggcaaagaaggtggtgaagacgggcagcgcgaagtccgttttccccggcccgaaggacaggaggacgagcaccagggtgatgatgccccaaaccacggccagtcccgtgtaaagaagtattttggtaaaggaatgcctgtaggtgagcgtgacttttccatgggcggatgttaccgtcagatgcctggaaggggccgcaggcacatcatggaattcatgctcccggaccagggacgtccagggggtggaaagtccgcagctgctgcaggtgaccgtgtcccggcggttgtccacatccgccgcggaaaagggagtgccgcatccgggacatttgaattgttgaaggctggagggcataggggacggcttgctgcctgtccgcaggctaccacagaagacgggaagccgccaattcctttttaggcgcgtctccggaagggccttccaagggggattccgcatgggttccgcagcctctcatacgggaattcccccttgtgcggcgcatagcctccatgtaggatggcgcccatgattgagagcaggcggcagttgagggaaaggattgaggcgttggcggaaccggagtttcagaagttctccgcttccctgattcccggcgtcaaccgtctgctgggcgttcgcctccccgttctccggaaccttgcccgcgaggtggcgggggggaattggcgggagctgctggaaaatccagccgttgacccgtatgcggaggaagtgatgctggacggcatgctgatagcgctggcgcgcatggagccggaagagcgcctggaacaggtcgcgcgcttcgtgccccgcatggataactgggctgtctgcgatactttctgcaccagcctgaagttttgtaaaaagcatcctgccctggtctgggagttcatccagccgtatttaacgtccgcacgggtctatgatgtccgctttgccgtggtgatgatgctggcccatttcattacggaggattacgtggagcaggtgctggccctgctggatggcgtgcggcatgaggattattacgtgggcatggcggtggcctgggcggtttccgtctgttacgtgaagttcccggcattgacgctggagtatttgaggaattcgtccctgtccgatttcacttacaacagggccttgcaaaaaattattgaatccctgcgtgttagccgggaagacaagagtttgatgcggagcatgaaacgcaaataggcagcggctccctgtccgcgcggagggaaccgcaggaaaaggggtgtgcggagatagtgacgcacggaggggagccatgccggaacggggccttgattccttcccgtggagggtatggaatgagacacttactattaaaaccatgcctaatattaacgataacttcctcaagctgcaggcgggatatttgttcccggaaatagggcgccgcgtgaatgcgtttgctgagtcccatccggaggcggccaaaaggctgatccgctgcggcatcggagacgtgacggaaccgctgcccatggcggccattgaagccatgcacgaggcggtggacgatttgtccacccatgagcgctttcacggctacggtccggagcagggctatttctggctgagggaggctatcgccaaaaaggcctaccaggtccacggcgtgcatgtggaagtggatgagatttacgtgtctgacggcgccaagtgcgatacgggcaatattctggacattttcgggccgggcaacaggatcgccgtgccggacccggtttatcccgtgtatgtggataccaatgtgatggccgggaataccggggattccagcgcggacggttcgtatgagggactggtgtacctcccctgcacgccggagaacaattttgtgccgcaattgccggatgagcatgtggatttgatttacctgtgcttcccgaacaaccctaccggggccgtggcttcccggaatgaattgctgaaatgggtggagtatgcccgggcgaaccacgccattattttgtacgattccgcgtatgaggcatttatacaggattccgccgttcccaagtccatttttgaaattcccggcgcgcgggattgcgccattgagttccgctccttttccaagcaggggggcttcacgggggtgcgctgcggctacgtggtgattcccaaggagctgcacggccatgattccggggggaacaaggttctcatcagccagctgtggagccgccgcaccagcacgaagttcaacggagcttcctacatcgtccagcggggagccgcggccctgtttacgctggaaggcatggcgcagaccgccgtgctgatcagccattacctggggaatgccgcgctgctgctgaatgcctgccgccaggcgggcatgcgcgtgtggggaggggaaaacgccccgtatgtctgggtgcagtgtccggacggcctggatagctggcagatgtttgacaagatgctgtatgaggcgaatgtggtcattacgcccggttccggctttggttccaggggggaagggttcttccgcatttccgcattcaattcacgggagaacgtggatgaggtctgccgccgcatccatgccctgtttgccagataaggaggcgttcccaggcagattttgtcaggccgcagtgcgggaagcactgcggctgcgcgcatgattgtgatggggaaagccgcatggaggctgttcctgcctaggatggcgtaatccgtccggtttcagaggaaagccgtccggcgcccggaagcggagcttgttaaggtcggcggaaacgctcgccagggcggagaaaatgagagaactgcatgagctcctctggcgttgcagggaacggcctttgccggagtgcctttgttcatgggagaagaaggagagcattctggctcaatggcccggatagacctgtttccaggttttgccttcgtccgtgctttcatagatgcctttttccgcgtacagggtaatgtgcctgttgttcgcggtgtcaatcagcaggttgaaggcggctccccagtcttccttgtcggaacgcttctgccagtttctggcgttgcgttcgctggagtacacgcccttgccgtccagcgggacggcgagcatgaaggtatcgtccaggcggcgcctgtcgatcgccagcgtgggctgcgtgacgggcagcccctggagcacgcggttcatggtgcggcagtcattgaaggaggtgtaaacgccctgggtggagaagacgtagagctggtctgcggcgcgggtgtcgtacaccagtctcaggaagcccgctccctgcacttcgtttttctggttccatttcttcccgttgttggtggagatgaagattttgctggtgttggccttgcggtccgccgtcacggctccaatcctgccctgggcggtcgtatggaagccgacgttggtgacgggttcccccaccaggcccacgttgttccaggtgtctccgccgtccgtgctcatgaagagtccggcgcggtccgaaccggcgatgatttcccgcggattccggggattgacggagatgagctccccggcaatgaaggagatgggggacgggtccacttttacatccgggttggcgacggtccacgttttacccatatccttgctgctgaacagggctcctccctgggaggtcggggccagcaggaacattttgtccccggcaagcgccatggaacggacggttttgacgcccctgggcagtgtgaggggcttgcgggcgtaggttccgtttttgcgttccagcaggtccgccccggaacggtagcgcgccaccgccagatccggggagagcagggaatagccgatgatttttccggcaggcatggcggcggttatcttgtgcggctggagtttgacgggtttgatggagattccgtccatggcggcggagaagatgcccttgcccttgcccggaatggtcctgaacgtgatgccggcgatggcttcctccttcatcgggatgatgcgctgcatgcccatttcccattttttcatgtccggggaggtgaagcaggtgaattcattgccgcgccgcatgatgcgcacccaggagtggtccttgttcagggtgaaggtggattggcgccccgttccgtagtcgctgaagtccgcgctgcaccggaggccgcggcccacagtccggaagacggcgatttcatcgtcgtagttggtggctcccgtgtccttgcgcaccatgataccggcccagcagtcgtccccggtgtccagcgccttgtcgctgatggagctgatgtgggctgtcagcatgaagtcacccttgatttttttgctgaccaggtattccccttcccccacgaagcgaaaggcgtttcccgcgccgctgatggagtggggcagccccggttccccgcgcagcatggcttcccagccgggggtgatgcggctctgggaatggacggggacgacgggggtgtccaccgtatgggaaccgttgtagaagacgcgcgcccacagtttgttttctccgtcaaagagcatgaggggagcggtgaagggggctgcgtccgcggcggcggccagcttggcgccgttgtagtattccaccttgttcacccgtccggaggagatggctgttttcagcacgcgttccggtcccttgccgcccacttccagcctggcttccggtatgtccgcccgtttggggcgcatgaggctggcgagcggtatttcctccatggggcggttgccatactgccagcccacccacgccacggtgaattcgtgttccggctttttcttgaagtaggtcagcttgatgggagtgacgcctttttccagaaagacggaggcgcgcttttccgacgtgctgtgcagtccgtcgttgtcaataacggtttttccgccgacgtccaggcggcttccgtcacaggtttggagggcgaaggtgtaggcccccgtctgggggacgaccaggaagccttcatattcaaaggcgaatcgtccttccctggctccgcgcagggccgtgtcaaatccatgggagacgccggtccgcaacggcttggagaagtccagttccgccagtttggaccatccgtccttgttttccaggtatttgtattccagtccgctggacaggtcttttttgccgggcagccttttgaggggagtttccgcagcggccttggcgagtttcagggttttctgctggtcaaagatgtccgtgatggtgagcctgacgaagcattgggggatgtcccgggggagcgcgacagctttggtgcgtacgtgcgggatttgttcctccaccgtgtaaatgggagttccggagtattgcggattgtcaaagacctctatcttgtacccgaactgcggggaggacgtttccgccagcgtccagtccacgatcacctggctgccgtcgtggcgcgcgttgccttccgccgcgatggcgtccatcacgggcttgtccggctggttcagcttgaacgtgtgcttgcggcccggctccaggtttctgggaaattgcctgttttccgtataggacatggtcaggatggagtcgttttccgtctggtggaccgtccagccgctgtatttcatgcctccttccttgggaacgttgatggaaacggtatcacatttttcccacgcgccgttgtgcctgtagaagcccttgccgcgccacagttccctctgcttgcggcccccgtgcccgaagtcctccagaaagccgccgttccccttgaagccggtggccgcatagggaatgcggaaggtggcgatgtggtgccaccggttgccggcctggtctttcatccaccagccggcgtagcattccttcctggcttcgtccgcgccccaggtccgcatgagcatggtgtaccactgcttggtcttgatccacgggacgtcgcgccccccggcctttccggaagctccttcacccacgtattgctgggcgtagacgtgcggattgacgtacacgttgcgcacctgccgcccttcgtaaacgggagcgggccagaaggaccatacggtggaggggcggtaggtttccaggttcgtgttgtcgttggcgttggccgccacgccggcatagaagtagccgcccttggggaacatgtccaggttccagcaggaaaagtaggtggattccggccagtaggggtagagcaggtccaccatgatgatgtcggaaccggcttttacttcgtcaccgtaccagctggcggaaacgggaagcgttaaaagaagccacagggagagcaggaatctggtcatgacgatgaagaggggaaaatttgcaaaaacgtggaaccgttccatttatcatgaaaaggggggcgtgcgccagcttcaaatgaaataacgtcatcccggttttgtcagcggatgggatgacggcgtctccatggcgcactcggtccttgctcctgtttgtttgtgcggagtaggttttggaacatgatcccgcaggtgcgcatgagttcttttttccggctggccgttgtttctgcgtgctgttcctgcctgctggctgctgcggggacaagccgggggcaggagagggaaacggcttccgccccgccggagccgctttcctgcgttcatgctccggatggaagggtaacggtgcggggtacggccatgggaacggtgtttacggtgcgcgcctatcccgggcacgggatggatgcggcgcagacggagaaggcctgcatggagtctcttgcctgcgccgtccgctgggagaaggtgatgtccgccatggatgcggggagcggtctggcccggttgaatgccgcggaaaacggcgtttccgtccccgtttccctggagctggaaaaggctcttctgctggccctggattatgcccggctgacaaagggcgcctttgaccccacgctcggtccctgtatccgcctgtggaagaagagccgccgccacggcgttctcccgtccggcggggaactggaacgtgcgcgccgggcgtccggatgggaaaagctgtacgttggcaagggggccgcggtcaaaacggttcccggaatgagggtggacctgggaggcatgggcaaggggtttgccgtggaccggatggcggagattttgagaaaaagaggaatccgttccttctttattgacagcaccagcgacgttatggccggcgcccccccaccgggggagcggggatggcggctgctggtggatgaaggtaatgggaagaatacggtgctgctgttgagccatgccgccgtctccacctccgggagcgcccgccagatggcgaagatcggcggtgcggagtattcccatgtgctggacccccgcacggggctgggcatgacggagggcaggcaggtgagcgtgcaggcgccttccgcggcgctggcggatgccctggcgacggcggggaacgtgatgcgtgaagaggatttccgctccctggcggcacggttgccgggagtgtccgtcccggcttttttccggagttcctcacgttttgcggaaggaacgcaggaacaggatggcgcacggaggccgagatagacagcatgatgaaagaaacgggggagcggacgcgttttttaaggtacacctccatagaccatttatgaaattgtaccgttttttcctgcctgccgtgcttggcgccgccgtatcctcctcatttggcacggagttcccgaatccttatccggctccccctcccggcgtgcgcctgactcctgaaaccccgctttccccctccgtcaacggcgcccgcattgttggcgccactcccggcgcgcgggtgctgttccaggttcccgtttccggggagcgtcccatgaagattcaggcggctgggcttccctccggcctgaggatggattcgcgcgggctggttacgggtaccgccccggcgaagaagggggaatacaaggtgaagatccaggcttccaacaggcatggaaaagatgcgaaggagtggattctgaaggtgggggatgagttgtgcctgaccccgcccatgggttggagcagctggtattcctacagtgaggccgtggggcaggagaatgtgctgaagacggcccggctttttgtggagcgggggcttgtcaaccatggctggacctatatcaatattgacgattgctggcagggcgagcgaggcggacggaatttctccatccagcccaacaagcgctttccggacatgaaggccatgtgcgattccattcatgccatggggatgaaggcgggcatttattccacgccctggatggggacgtatgccgggttcatcggaggaagctcgcccaatgcgaaggcggattacggggaaatggccattccggagaaggaccgcaagcagaagaatcaaattttcgggagttaccccggcgtgcatcgcaggaaggcggaccgtgtaggcgccgtctggctgtttgaccgtgacgccaggcaatgggcggactgggggttcgattacgtgaaggtggactggaaccccaatgacgtgccgacgacggaacgcatccgccaggctctggacgattccgggcgggatattgtgctcagcatatccaatgccgccccgtataaacaggtggaagagctggggaagctggccaatttgtggaggacgacgggggatatccaggaccactggggcagcgtcagcggcatcggcttttcccaggaacgctggcagaagcacatgcgcccgggccactggaatgatccggacattctccagatcgggaagctgggcaagcccaaccagcccaataccacgtttgtccagacgcagctgacgccggatgaacagtacacccatgtgaccctgtggtgcctcctgtccgctccgctcatcatttcctgtgacctggagcatattgattcattcacgatggggctcctgaccaacgacgaggtgattgccgtggaccaggaccctgccgcccgtcccgcccgcaaggcgtggcaccgaggggatttccaggtctggacgaaggagctgtccgacggttccctagcggcggggtttttcaataccgggaaagagaagggcgtagtgaaggtgaacctgagggagctggggctctccggcgcgtatgaagccagggacctctggaaacgcgccgaccagggaacggtgaagggagatatggccgtggagttgaacagccatggagcggccatgttccggttcagcaaaaagaattgacggcaggggcaggaatggatgctttcaaggacggcatccttttttgccggccagcgggtccgtgaatgccgcgttttaccgcctgtccattattataggaataaagggtgaaatggatagccggctttgcaaggatagcctgatggggcggcggctttaagaaacgggctgtttcagccttgtttgcagggggcttgtgttgcggcaaatccgctgccgccctttccgagtgaaagtctttattttttccataaaaaagaaccgttccggttaaccggaacggttcttataaagagattgatgtgacttgccttaatctctccgtacagcttccttaagcggcgatgccgaagtgctgctggatggaggcgaaaatcttgtcgcggcgggcgcgggctttttcgatgtcacgggtcttcagagagaatctcaggcgttccgccgtggagtcaggcttgtgaaccgtgacgtggcaccaccaaacccccctgttgttccacaggtgatggttggggttgtcatcattaattctaagagcgattttggtttgggctttcatctgtgtgatctttttccagtaggggacgtcttatttacgtccgttggtatattaatgtttcaataaaaccttcaacttggaggcgcctcacttaagcagatgatcccttgtctttttggacatctttttctgccagttgctcacctcgttgaagccttagagttcaagtggtgtaacaacgttcaaaaaaaagaatcttttttacaggagacctacctttttaagagtgttgtaagcaccgttcttgttgatcgtacgcagggccttggcggaaatcttcattttcacgaattgaccgagttcgggaacccagatgcgcttttcctgaaggttggggaaaacggtacgattgacagtcttagtgacgtgacgaccaataccgccctttttcttggcaagaccggagcgatggatacgacgacctttgtgaggcatggtacctctgatgatgcaaattcgggacatggcaatcgaagttatttgttaatgcgagagaggtagtctagcgtattttcgcctaaggtcaagaacaaccgaacaaaagactcggaatttgtgccggcccggcggaagcgctgccgggctttcctgcggtctggttccctccgttcatggccgggggggcaggcgccggggaaaggcgcgcgcggccggatggcttgtttgcccgtgtaaaacgtatccggcgcttgcacggagggaggcggcgtgagagattgaaagcatgagtgagaatcattatgcagagttttccgaatgcagcatgaaaccccaggacgtgctggagtatgtttccggtcccatgccggttccggcggagggggaggtgctgatccggatgaaggcggccccgatcaatccggcggacatcaattttgtgcagggcgtttacggcgtgaagcccgtgctgccccattcacgcgccggactggaaggctgcggcgtggtgcaggagtcccgcgcagaaggcttccgcaaggacgatgaagtgattctgctgcgcggcgtgggttcctggagcgagtatgtggcggttcccgccgtgaacgtgatgaagctccccgtgaaggtggatcccgtgcaggcggccatgctgaaggtgaaccccctgaccgccctgcgcatgctggaagggttcgtttccctgactccgggagactgggtggtgcagaacgcctccaattccggcgtgggaaggtgcattattcaactggcccgggagatgggcgtgaagacggtgaattttgtaagaaggccggatgaattgagggatgaattgaccgcgctgggcgccgacctggtagtgggagaggatgacgaggatgtggtgaagaataccctggcccggctggacggaaagaggcccgtgctggcctccaacgccgtgggcggggaaagcgccctgcgcctgatggacatgctggctcccggcggaagcatggtgacgtacggcgccatgagcaggaagagcatcaaggtgccgaacggtttcctgattttcaagggcattaaattggaaggcctgtgggtgacgcagtggctcaagaatgcccccgttccggagattgaggccgcttatgacaagctggcgcgcctgatggcggacggcaggctgaagcaggccgtggataccgtttatccgttgagcgacgtgcgccgggccgtggagaaggcccaggaagagttccgcagcggcaaggtggtgctgagcatggagcgtgtctgatgcatggggggagagagtttttgttttcccgggctgcggagcgctggagggattttttcagcgttccgtggttcggttggtattggctgctggcctgggtgatggcggggctgagcctttattccatatggcaggccggtgatttttttctggaaaagagccgttttgcccgggagggcctgtgtacggaagggacggtgcggaacatcacggaggatacggtgaagttgtggagccgttcgcgggtcatggggacgtccggtccctctctggacgtctgggcgccggaagtgcggttcctgccgcagaccggggagagggaagtggtattccagtcccccgcttttcttttctggtcttcctattccaggggggaccgggtgacggtctgctacccgccggaacgcccggaagacgcccgtgtggcggacagcttcatctggtggccggaaacgcgccgggccctgtggctgatggcgtttctgcttgccggcggaacggtcctgctgaggaagagggaagtgcggagttccgtaggcgcgtaaagcagggattgcgccgcggcacggcgccgtttgccgtttcagcccagcgtggaatcaagccacgtgttgaggatttccacggcggccacctggtcgatgatggggcggaagcttttctcctttttgccggcggcgtgcagtttttcctgggcgatgacggtggtgaggcattcatccatgaataccatgggaaggccgggaagggcggcggccagttccctgccgaacgcgcgcaccttggcggcggcggttccttccgtgccgtccatgcggacagggatgcccagcaccagggtgcgtatcccccgctcctggacgagctggacgatgcgggtgacgccgtccgttttgtgcctgtggatggtttccacagggtgcgccatgatgcccacggggtccgtggcggcgatgccgattcgggcttctccgtagtcaatgcccagggccggatgctggctggtcatctgagttcgtccggaagctggttgacgatttttttaatttcgtccgccttgtttttatccgcaatcaggatggcgtccgccgtttccaccacgatcaggttttccacgcccagcagggccacgtgcttgtccccccgctgggagaagacgatgttgccggaggcgtcctgcacggtgatgtccgtattggtggtgtttttgttgtgggtttccagatagttggctacggatatccaggagcctacgtcgtcccagtcaaaggtggcttcaatgttcagcacccggtccgcgttttccatcagcgcgaagtcgatggagatgggcgtgagcgccgggaattcctcccggatggtttcctgcgggtccggggattccgcgatgtgctccacgaaggaggccagctccgggcagtgcttgtcaagctgttcgcacacggttggaatgctccagacgaacatgccggcgttccagcagaagttgccctggctcaggtaggcggcggccgtggccgtgtcaggcttttcgcggaattggatgacttcgcggcaggagcagcccggtgcggaagcgatttccttcccgcgttcgatgtagccgtaggaggggcagggccaggtgggcttgatgcccacggtgacgagcgccttttcccgcgccgccgtgtccatggcggctttcatcagggagcggaaggacgcctggtcctggatgagctggtcggaagggatgacaagcatgaccccgtgcgggtccgccgccttgatgaggccgatgcccagggcgatggcgggcgccgtgtcccggcgcacgggttcggagatgatgttgtccacggggatgtcgtgggcctggcggcgcacttccgcctcctgcaggtggttggtcaggatgaagatgttctgccggggcaccaggccgtccagcctgtcgatggcctggcggaggagggtgccttccccgaacatgttcaggagctgcttgggacggtggtcgcgggagaggggccagaaacgggtgccgctgccgccggccagaatgagagcgtattggttcatggcgattccgtaggaatgtggtttaaaaaaggagtcaaagtgcgccgaagcggcgttttctgcgggagtagtccagcagcgccgcttccatgtcacggtcgctgaagtccggccacagcgtttccgttacatagagttccgcatagctgatctgccacagcaggaagttggagacgcgcatttccccggaggtgcggatgagcaggtccggttccggcatgccggcagtgtccagatgctggttgaagaggtcttccgtgacggcgtccgggtggagttccccgcgggaggctttctccgcgatttttctggcggcggcggcgatttccgccctgcttccgtaggagagggccagaaccaggttgagcctggtatttcccgccgtggcttccaggctggattgcagcagtttctgggttcgcttgggaaggcgtgaaaggtcgcctatggcgtgaaggcgcacgcctttttcctgcatctggctgaggcgttttttcaggaattcgtgcagcagcagcatcagcgcgtgcacctccgtcttggggcggttccagttttccgaggagaaggcgtaaagcgtgagccagggaatatcatggtcaatgcagaagtccacacagcgctccaccgtatccgctcccgcccggtggccggcctggcgcggcagatggcggctgtgcgcccagcggccgttgccgtccatgatgcaggcaatatgaaccggcagtttttccttgggaatggtaagcatagatagatggggctccgctactctagtccatgaccgggtccagttcaacacgcaagtttttcaggatgtattcctgtctttccctagtgtttttgcccatgtagaaggagagcaggtccttcaccttgtgtgagtcttccaggcgaacgcggtccaggcgcattccttccccgatgaaggccttgaattcctggggggagatttcgcccaggcccttgaaccgcgttatttccgggtttttgcccagcagggcgatggccgcttcccgctccgcgtccgagtagcagtagatggtctgctgcttgttgcgcacgcggaagaggggagtttggaggatgaagaggtggccctcccggatcagctccgggaagaactggatgaagaaggtcatcagcaggatgcggatgtgcatgccgtcgtcatcggcgtccgtggcgatgaccaccttgtcgtagcgcaggtcttccagcccgttttcaatgttcagggcatgctggaggaagttgaattcctcgttttcatagacgaccttgcggctcatgccgaaggagttcagcggcttgccgcgcagggagaagaccgcctggatttccgcatcccgcgccgtggtgatggagccggaggcggagatgccttccgtgatgaagagggtggtttcccccgcgcgggcgtgcttggagttgtagtgcacgcggcagtcccggaggttcttgttgtggattttggccttgcgggcgttttccttcgccagcttctggatgccggagagttccttgcggtcccgctcggagtctttgatcttggcttccagggctttggccgtctccgggtttttgtgcaggtagttgtccagctccctggcgatgaagttgcctacgaaggtgcggatggtttccccttccgggctgatggtattggatcccagcttggtcttggtctgggattcgaagacgggttcctttaccttgatggagatggcggccacgagggaggaacggatgtccccggcctcatagtttttcttgaaaaagtccctcagggttttgacgatggcctcccggaaggccgtctggtgggtgcccccctgcgtggtgtgctgcccgttgacgaaggagtagtgctcctccccatactggccgccatgggtgaaggccacctcgatgtcgtgcccttccagatggatgatggggtacagcggttcctcgctcattgcctccgtaagcaggtccagcaggccgtttttggagacgtagcggcgtccgttgaagtgcagggccagccccttgttgaggtaggagtagtaccggcacattttttcaatgtattccggacggaactgcgtggttacggggaaaatgtccgggtctgcgtggaacgccgtgcgggtgccgttgggctcctccgtggcgccgtccttccgtcctttggggagttccttcccgcggcagaactggtaggagcgcgtttccccgtcgcggtaggcctggatttcaaaaaagtcggaaagggcgttcaccgccttgatgcctacgccgttaagccctacggatttcttgaaggcgtcgctgtcgtacttggctccggtattgattttcgcggcgcagtccagcagtttgcccagcggaatgccgcgtccgaagtcgcgcacctcgcacaggccgtccggagtcacgtcaatggtgatttttttgccgaagcccatgacgaattcgtcaatcgagttgtcaatgacttccttcagcaggacgtaaatgccgtcatccggagaggttccgtcgcccagtttgccgatgtacatccccggacgcatgcggatatgctccctccagtccagggttttaatgctgttttcgtcgtaggccatgtgcagcggggtcgcgcctattatagcggagcccccggaatttgcgaagaaaaaatgcgtgcccgtccatttgcgcccaatgggggcttgacccggaggccgtcccttggtggaatccatggcgtatgatcagttgcaaggctccgtgcaaggtgaacgtttccctccgcgttctgggtaagagggcggacggtttccatgaagtggataccgtgatggttcccctggaattgtgcgacgtgctggagtttttcccggcggacggcctggaaatgagctgcgacgccccgggagttccgctggatgaaagcaacctggtcatgaaggcggggcggctgatggagcgggagctgggacggcccatgccgtggcatgtgcgcctggtcaagaacgtgccccatggcgcggggctgggcggcggcagcagcgacgccgcgtgcgtgctgtccgccctgaatgagctggaacacggcggcctgtcccggaggcgtctggcggagctggccggggagatcggttccgatgtgggatttttcatttatggaatggcgtgccgctgcaccggacgcggggaaaaggtggagcccctgccggaatggagggaatggcgcccctggatcgttctgctgaagccgtcgttcggcgtttccacgccggacgcctaccgccgctgggcgggttcacgggaattgccgggcataccgtacggggagcagcgggtggacggccatgtgctggtgaatgatctggaaaggcccgtgtttgagaagcatttgttcctggcggagatgaagcgatggctgctggagaggcccggcgtgcgcggcgccatgatgtccggctccggctccaccatgttcgccgtggcggaggatgaagaagcggcctgcaagttgatggaggacgccgcgcgggaactggaccccacgctgtggatgtggtccgggcttgtgatgcgggagggcgcccggtaaaaacatggttgtgcaggaggccttgccttgacggcgggggatgcatgccgttacactccgtccatgattaaaagtttgtttgcaggtgtgatggtggcggctgcgtgcgccgtccaggccggtgaatacggagacagcgccgtccaggccgcccgggagctttccggagcggtgaaaacgggggacatgatgtggatgattgagaagatgtacgctcccatgaagaagcagcttgtttcttccttcccgggaggggaggccgccttcatgaagaccatgagggaaaagatgcagggagccgccgccgtgatgaaagagcgcggcatggtggtggagacgtatgaaataggccagcctacggcggaacatctggtgaagaatggagacgaggtgctggtggtgctccccacgcggatggtcatttccatgaagcgtccggacgggatgcctgtaaagatagagaatacaggcgttctggtgctggtgaaggatttgaaggacaaggggccctggacgttcattgatgcttccaagatgaatgcgaatgccctgcgctccatgttctatgacctgccggaaaaggtgaatctgccgccggtttcctcccgccagcttcccgtgggccagtagggaagcgttcccgtatgaatggcgccggggcagatgacgtggaaggcgttagcgcctttgaggcttatgtccaccgggcatttgccccggacgggttgttctcccgcgccagggattttgaataccgggcggagcagcagaatatggccctggccgtagcgagggctctccaggtggacgccccgctgctggtggaggccggaacgggcgtaggcaagtccctgggctatctgctgccggccgtgaagtttgcgctggattttgaccggaaagcggtcatttccacgcataccatcaatttgcaggagcagttgttcaacaaggatattccgctgctgcgcgccgccctggggattgatttttccgccgccctgctgaaaggcaggcagaattacctgtgccatacccgcctgcggcgcgcgctggcccagatggattccctgtttacgcagggggaagccgcggagctgacgcggattcaggactgggcgctgagaacgcaggacggcaccctgagcgacatggcgttccgtccgtctcccaaggtatgggccatggtgtgcagtgaaccgcatgcgtgcagtatgcgccattgcggcccctcctgtccgtaccaggtggcccgcaagagggtgctggaggccaaggtggtggtgctgaaccataccctgtttttcggcctgatggcccaggcggaggattccgaggaggcggggttcgtttttcccggggattttgtggttctggatgaggcccacatgattgagaacatcgctgcccggcagctgggcgtgcagctctcggaaccgcatctcaattatgaactgctgcggatgttcaatccgcgcacgcacaagggcctgctgaaaccgctgaacaatccggccctgttccagcgggtgcaggacgtgattgacgcttcaggcctgtttttccagaatgcgcgggatgacctggggtttgcgggttccggcaagattgtccgcattctccagccggaatggtcccaggacattctttccctgcctctggcggaattgatcggagaattgaagagggagggcgcgaagcaggaggaaaacgtggccgtgaaggatgaactggcggacatggccgcccgcatggaggaggcgcaggcctccctgaaggtgctgatggacatgacggaggaggggcacgtgtactgggcggagcggtccggtccggagggaaggaacatgagcgtgtgctccgcccccgtggaggtgggcgatatcctgagggagcgcctgttttccgccgggcgttccgccattctgacctccgctacgctggggacgggggatgcggacatgggctactttgcggggcgcgtgggtgcggaaagcgtccggaagctccagataggcagtccgttcaattaccgggagcagatgaggctgatcgtggcccgctccatgccggagccggaccagccggagtatgcggaagtgctgccggaatggattaaaaggtatctggcggagtcccgcggcagggccttcgtgctgttcaccagctaccggctgatggtgcaggtggcggaaaaggtgcgcccgttctgtgaagaacagggatggtccttgtacgtgcaggggcaggacatgcagcggcatgccatgctggaggcgttccggaaggatgtgaacagcgtgctcttcggcacggacagtttctggaccggggtggacgtgcccggagaggccctttccaatgttattgtgacgcgcctgccgtttgaggtgccggaccacccgctggtggaatcccgctttgagagcatcagggcgcgcggggggaacccgttttacgagtattccgtgcccgtagccattctgaagctgcggcagggggtggggcggctgatccgcaccaggagcgattccggcatggtggtgatcctggacccccgcgtagccaccaagaggtacggggcgcggttcatcaagtccctgccggatgcccgtctggagtttgtgtaaggagtttttcctccttaaaattggccggagttctccctctccctgccgtactgcatcaggcggtagctgaggggttgttccaggcgcgcttcttccagcaaagcgcagtcggcgaaaatgtccggaacgggcgcgtccgccagaatggatccatccttcatcacgatgcagcgggtgcacaggtccatgaccatgtccaggtcatgggtggcgatgattttggtatgggagaattggcgcaggaggctgatgagggtgcggcgggaggccgggtccaggttcgcgctgggttcgtccagaaccaggatgtccggggtcatggagaggacggtggcgatggagacggcgcgtttttccccgccggaaaggtggtgggtcatcttgtccgccagggcttccgcatggacgtcccgcagagcctgccgcacgcggcggctgacttcttccggagggaggcccatgttgagcgggccgaaggccacgtcctcccggacggtaggcatgaaaagctggtcgtccgcctgctggaataccattcccacgctttcccggacgcgggcgacggttttgggcgtgacggggatgtcccccacccgcacctgtccggaggagggctccagcaggccgttgaggtgcaggagcagggtggattttcccgctccgttcccgcccacgacggcaacggattccccgtgggtgatgcgcagggagacgcggttcagcgccggaggagaatcggggtagctgaagcacaggtcgatggtttctacaaggtggtggctcatgagaggaggctgcgggcgcactggcccgccagcatggtgacgttaaagcagcggaacaggatgacgagggcgcagaagagaatgccgcccgccacgccgcgcatggtgatgacgccgggggcgctgacgaattcggggtcttcccctccccggcacaggacggcctggtaaatgcgttccgcgcgaccgaaggtgcgcagcaggagctggccggtcatggccccccaggtggaaagggggacggaaccggagcctcccctccgggagcggaacgccatcagcatgttctggaattcatccatcaggatgaaggcgtaccggtacaggaaggccaggagcgtgatcaggatgcgcggcgcgccgagctgcctcaggccccggcagagcggagcgaagcccgtggaggccagcagcgtgaaggctcccaggatggtgagcatgcaccgcaggatgatggagatgaaggagatgatgccctgtgtgacgggaatgccgaaccattctcccgccggcgtcctgtccaccagcgggttgaagaggccgatcatgacggcgacgggcagcagccacagggtgcgcttcagcaggtagcccagggggagccccgccatgcggatgacgcagaccgggaacaggaagaagggcagcagccccgtgatttcctgcggcggccaggagagcacgcagatttgaaagacgaggaaggcccctattttaatacgggcgtccagacggtggaatccggtgtttccgcaggaaaaccggtccatctggcggaattgccgcgcggcgtccgtgaacaggggcatggggggtcagcgggggcagtggctgtgcggttttctgccgaacaggaagccggccgcaaagaccagggcggcaatgatgacgctccccagcacgccggccaggctggtttcagggttgacgatggaggaggctctctccgtctctccggaggaggctgtttcctccgcggcggggagggcgtagtccggcatgatggcggtggatgcctgtacggattccaggctgcggtggagggaggaaggctccgccaggctggtttcttccgacccggtgacgccggccacggaccattccaggccgtccgggtaggcggaggcgaaccaggaaagggccgccccgcagagcagggccgctaccgcaaagatgcccagaacggtgaaggaggcttttttgacggggccggtttccagatcagccgggcgcagcagggagggctgggccttgctgatgaagatgacgatggccgccgtggcgagtccttccaccacgccgatggccagatggatgggaagcatcagttccacgaactgggcgaagggcagcgcggagatgccggaggccgtcgtttccagcacgacggagaaggcccccagctggagcccgatgacggcggcggtgatgctggccagcgtgattcggcccgtgccggggtttttcccggccaggggcctgtaaatgaaggggtaggctaccaggcaggagaagaagcccatgttgaagatgttgcagcccagggccagcagccctccgtccgcaaagaaaagcgcctgcaccgccaggatggccgccatgaccaggaagcccgcatacggccccagcaggaccgccaggatgaggccgccgcccagatggccgctggacccggtgcccggaatggtgaagttcagcatctggcaggcgaagatgaaggctcccagaacgcccatgagcgggacgagccgcacttccttttcctgcctgaccttgcgcgcgcagagcgccgtgatcgcggcggaagccgcccacatggtgcagcctaccgccggtgaaatgaagccgtccgccatatgcatgatgtttgtgtctttctattggatgaagtgaagtattggtaagagccccggaccgggcagattggcgccactttagcacaaacaccgcaaagccgaagaaggaaatgcggcaacgggtataagtattttccccgcgccgcgcggccttgctccctgcgcgggtccggtggaccgtgttccccggcaatagcgcctttccgggggagggggagcgcgttttctccgagtgtatccggcgggaatttggctgccgcgccgtgccgcccaggcgtgccgcgcggcggatgtggacggattgggcgtgatgcagacggggaagcggtttgctagacggaacccatgatgaatttttccatagctaagtgcttgttttccataggcgggtgcacgacgatcctgggcaatatttccgcagatacggccgtatcttccgccggagccatcggcggcctgggcgttctgacgattgccgtgaattatacgctgaacctgctcaagaagaaggatgagcagttgatggcgaaggacgcccgcattgaagccctgatggaccgcctgattgacaaatgcccgaattgcgagctggcgaaagcggccaacaagtcccttctggaggatgaatagcggaaggcgccgggatgcttaccttccggccgcgtccggcgtgcgggtgtagacctcccggtttccgtccgtgttcagaatcagcgtggttctgctgagtctgtcaatggtggaggttgtggtgaagagggaggagttcccgttgcctatgcttttccccgtcagggtcaggcgcttgccgtccagttgccagctccggtagagaagcgtgcgcatgttgatggatctcgccctgccgtccggcaggagctgcattccctgcacgtgccccggctgtccggggacgggctgggtccaggagccggaaaggctggacggagtgggctgcatggagcaggaggccgccgccagtgagagggccggaagaaggaggaaaaggcgcatggcggcgggtggtcagcgctgttccctgatgacttccgtaccgatgccgtccggagtgaagatttccagcagcagggtgtggggcaggcgtccgtcaatgaagtgcaccttgcgcacgcccgcgttcagggcgtcaatggcggagtggattttgggaatcatgccgccggaaacggtgccgtcttcaatgaggtccagggcttccgtgcgcgtgacggatttgatgagggtggacgggtccgcggggtccttcatgatgccgggaacgtcggaaatgtagataagcttgaccggcttgagctccttggcaagggccgccgccgccaggtccgcgttcacgttgagcggcttgtgggtgcccagctctttcgccaggggggagacgatgggggtgatctggagttccagcgcttccgtgatgcggtctgtcaggcagccgatgacgttgcctacttcaccgatgtccacggggttgccctgttcgtccttttcctggatgcgttcccccacgaagatttccgtgccgggaatgcctacgcccttgcctccgtagtcgcggaacatctggacgaggccgggattgatggttccggagagggtgcgttccacgatggaaatggcttccggcgtcgtgacgcgcagaccgttgatgaagcgggcctccagcccggcttccgccatggccttggagatggccttgccgccgccgtggacgatcacggggttgaagcccaggacttccagcagaacgatgtcgcgcatgagcttcttgaccaggcgggcgtcgtccatggcgctgccgccagatttgatgaggaatgtcttgtcccggtaggcctggaggtaggggagggcgccgacaatgacggaggcctgttcaatcaggcgggtgattttggagtccatatcaatcatgaaacggtaggagtggttgacaaaaagagagggagggagtccgcggcaggggccgttcaaagcaggcgcctgctcctgaaataaaccaggggaagaatgatggaaacgagcatgacgaccagggagatgtaatagccgtattcgttttccaggccgggcatgtgggagaagttcattccgtagatgctggcgatgagggtggggggcatgaagaccacggccgccacggtgaagattttgacgatttcgttctgctcgatgttgatgaggcccagaacggcgtccagcatgaagttcacgttgctggaaagaaagttggcgtattccgagagggacgtgacgtcgcggctcagggggcgcagcttgatgtacagggtggagttggtgtcgtccagggcctcttcattgctggcgtacgtgagcaggcgcagaaggttgaccaggcagtcccgctggcgggtgagcaggtcccccacgcggcccaggtcctggagcgtgaggcgcagggcgctggagacgggtacgcgcttgctggccttgccttccggttcgtccctgcggaagatgtttttggaaaggcggtccagttccgcgccgaagcgttccaggacgtccgcctggcggtccacgatggtttccagcagtccggtgaaaacctggtcccggctgatctgcttctggcgcaggagctggtgggagaagacacggaaggagtaggagtccgagtggcggatggtgatgatcttggcccccatgaggacgaaggtgatttccgacaaggagggggattccgtatccacgcggctgagcaccgtggtggtcatgaagcgggcgccgtcttccgtgtacaggcggctggtggcctcaatttccctcatctcgtcgtaggtgggcatctccagcccgcagaggcgttccacaaacttgatttccgccggttcaggggtaaggaggtcaatccagaagacggagtccaagttctgttcagccgcatccacctgggtggtgcgctcaatgccttccggggtttgacgatagagtcgaatcatgccgttgatttcggtggggggatggaacgatgccgtgcatgatgtcgagtgacacccaacgcgggcatgatgccttgtttgtacagggaagggaagtaaaaagggtgacaaaaagaggcccggttcccaaggtgggaaccgggcctgccggaaaaaagaaagggatgcgcgccgcttaggcgttttccttgacgaccaccttgagcgtggcttccacctggggatgcaccttgatggcgacttcgtgttcgccttcgctcttgatcggcttttcaagctcaatcgcgcggcggtccacttccactccctgagcggtcagggcatcgtgaatgttctggttggtgatggcgccgaacgccttgccgccctgacccacttcaagggtaaggtctacggtcaatccgttgattttggcggccacttcctgggcggcgctgagttcttccgcttcacgcttggcgcgggcggcctgaagattggcgatgaaacggcggttggaggccgttgcttcgtgggcgagaccctgggggatgaggtagttgcggccatagccagccttaacggtcaccaggtcggcttccgcgccgagtccttcaatttttgttgcgagaattacttccatcgttgccatggctaaaaagaaatggttatttgtgagcggttgaagtagtaagtattcgcccgaatgtcaagacaagagcgataaaaagggcgtttttttatgttttgggaggaaaaaatccccccggctgtcatgataggtgacattgcgcttgcttcacggggcggtagtatgtagggaaaggaaccgcatttgtcgcgttcgctcccggagaggagggttcgcccgcgggtacattacagatatttgatcttatggctattcagcgcgcattgatatccgtttccgacaagaccggcctggaggagtttgccaagggcctgcacgagtttggagtagagcttatttccaccggcggcaccgccgctttcctgaaaggcctgggccttccggtgattgaaatttccgactataccggggaaccggaattgtttgaaggacgcctgaagacgcttcaccccatggtgcacgggggcctgctgcaccgccgcgacaatgaagagcatgtgcgccaggcgaaggaaaacggcatcaagcccattgacctggtctgcgtgaacctgtacccctttgaggaaaccgtcgccaagccggacgtcacgctggaagaagcgattgaaaagatcgacatcggcggcccgtccatgctccgttccgccgccaagaactacgcctccgtcaccgtcgtgtccgatcccgcggactacgcgcgcattctggatgaaatgcagacccacaagggagacacgaccctgaaaacccgcgaaaacctggcagtgaaggtgttcatgcgcacctccaattacgacaacgccattaccaactacctgggccaccaaagcgcggaaagcaccaagggcagcttctgcatctgcgcgcccctgtaccaggaactgcgctacggggacaacccccaccaggaagccagcctgtacggcagcttcggggacattttcaaccagctccagggcaaggagctttcctacacgaacgtgctggacatcgaaggcgccgccgagctgatcacccagttccgccgcccgacggtgggcatcctgaagcacacgaacccctgcggcgtgggccaggatgacgaggacctgcgcaacgcctggcagaaagcctttgaaacggacacgcaggcccccttcggcggcgtgatcgtggtcaaccgtccgatgacggaaggcctggcccgcgtgctgagcgccattttcacggacgtcatcatcgccccggaatacgatgcggaagcccgcgcccttctccagaagaagaaaaactgccgcatcatccgcatgaacacggaagcctggatgaaggcgcgccgcgaacccatcatccgctccgctcccggcggcttcatgaccatgaagcgggatacggacgtgatgggcctggacaatctggaagccaaggttgtgaccaagcgccccccgacggaagaagaacttaccgccatgcgcttcaactggcgcgtcgtgaagcaggtgcactccaacgccatcgtcttcggcggcacggaccgcacgctcggcatcggcgccgggcagatgagccgggtggattccgcccgcattgccgtctggaaggccggacaggccggcctggacctgaagggcagcgtggtggcttccgacgccatgttcccgtttgcggacggcctccaggtagccattgacgccggggccaccgcctgcatccagcccggcggttccatccgggacgaggaagtgatcgccgctgcggacgccgcggggattgccatggtgttcacggggcaccgccatttcctccattaatttgaatgatcggccccgtccccttgtcttaaaaccgatatgttgctaggtgtaaatatagaccacatcgccacgctgaggcaggcccgctatgcgaccatgcttgattccttcaacgtggagccgagcgttttggacgccgcctacgcggcgcaaaggggcggggcggattccatcaccctccacgtccggggggaccgccgccacatgcaggatgcggacgccctgagcgtccgtgagagcgtggcccttcccctgaacctggaaatggggaataccccggagatggtggactttgcccttcggctgaaaccggactatgtctgcatggttccggaaaagcgtgaggaaattactacggaaggcggcctggacgccgtctttcatgaaaaggaactggcccccaccatggcaagaatggctgacaacggcattcaggtgagcctgttcattgatccggagctggcccaggtggacgccgccgcccgtctgggagcgcccatggtggagcttcataccggatgctttgccaaccacgccgggaaggaacgcacggcggagctggcccgtttgaaacgcgccgcggagctggcccactccctgggcatccaggtgaatgcaggccatggcatcaactaccagaatctggaacagctgatggacggcgtgccttacctgcatgagctgaacataggccatacgatcgtagcccgcgccctctttgtggggatggagcaggccgtgagggaaatgcgccaggcgatcgaccgcctgagctgatattcccgtttcaactttaacccccggttgcaggaacatgagccgtattgcaggattgggaatggatttgatcgacctggaccgcgtgcgccaggccctccagaaaaacggggaggcatttgccctgcgtatctgcaccccggatgaatgggcctattgccggaagcatgcggaccccgtgccgagcctggcggcccgttttgcggccaaggaggccgtggcgaaggccctgggaacgggaataggggaaaaatgcgcttttacggatgtggaagtggtgcgcaatgatgcgggcgctccctccatcctgctgcacggcacagccggagtgacggcccgggagcagggcgtcacgggctggttcctgaccatgacccattcccgcctgagcgccgcagccgccgtcatcgcccttgccgaagccccggaattttcctgacgcttcagaatcgccgcaagccttggccgctcccgggaccgttttccctgaaccaaagccggctggaacataccgggtcctgagcccaggaaatttctacaggatgccttgccagcggcgccgatgaataccgtgttcctacaggttttcaaggttcttcttgatgacttccctattcagttcgcggagggcggccagagtttcaaaactcggcgcttcggaaaaatcggtttccagttctttcactctcttttcatagtccgccgcatggccgccatcccttttcaggatggagatgtttttccgggtttcatccgcaagctctgaaaacgtcttccggtcggggatcgggctccaattgatggacttcaggaagctctccacctccggaaccgtcacgttgaagaattccgggcgcacctcctccggcttccggtctttgaaataacttatggcaaaactgaagctgtccgactccggcttcagctcaaatttgatatcatctccatgaatccggatctggcggagggattctttttcaaaaacgatgaacgtgccgaactccttgtaagcatagcggttgaagttcattaccccgtttcccccggttgttttcgtcagaacccagtccggctttccgcatggtttttccccgtctccttctttcagggcgaattgcgacttcagttccggcttcccgtaaccgtgaaccggcgacgcccagacttcatacagttgtccgggataactgaccttgacgaacagccagtccgggcgatccttgaactgcgctatcctgacgtccagaacactgttttccgggcggaacgtgaatacggccatttccatcttgccgttttctacggtgtcaattttttccgcgactttccggtccagcagtgttttgccgtccttgccgatcacggcaaggaaattgacgggactccagcttccgggagtattggggttcctccaatattcgatgccgaatctgaaatccccccattcctgctgaaccggcttgttgtcattgggattggtaacggtgtggtaattgatttttccgttgccaaggttgacggtatggcgggtcacaaggacgggagttcccttgcggtcaaatttctcttctttcttttcaatggagggggcggcgtacagcagtgtggtgcacaatccggccagtacggtcagggtgagtttctgcatgattattttacctctatttcgtgttgggtattcaagcctgtagccgcgtcttcaatggtgatgcggtatgcgccgggaagatcgttaaaggcgaaatccagcgggtattccgtcttgccgtaaatggttttgctgcggtgcagaatttccctgccgtccggggccgttaccgtaatccggtacgcgcgttcccggggattggccggtccggaaatcttaagcagggcccgggcgcctttggccacctgggccggagcggttaccacgggcggctgctgctcccggtcaaacagggcaaagcagcggaacggcgcattggagaatttaaagacaagcttgtctgatttccccaccagtcctttgcggcactcatagatgtatttttcttccggcaatttggcggtgaatgatttgccgaggtccttttcctggccgagggcgcccagcagttcgaattctccggccttccgcggacggaccatcagggtgtcgctgaaatcggggatgacggccagaggacggactccggcgtttttcaccacctggtcaaggaacgtgttcagggaggagccgggcagggaattattttccagaacggagagggaggcattcagcaggatggcgtttcctttgccggccttgcggagctgcaggcccggattgccgtggactgcatgggccttttctcccgccagggccagggctccgcttgtgctttcataaggctggatttcgagctctttcgcctggccgaacgtcaggttcccgaaaagttcgcccagggggttcacagtgcgttttttcaggttttcgttcaggatggcgatattggcgtcagccagtacggtgccgccggatttgacgaaatccagaatggccgcgcactctttgtcgctcagggaggaagctccgcagaggaagaggagccgtgcgtttttcaggcgttccagggtattgggcgagacgaaattgaagcccagcccgcgctggtagcaataccggagcagcggattcatgctggcgtccggcttgacgcagcggctgtccgcctgggcggcggaattggaggtgtggctgtagtagaacaggatgccggtatccggaaacggggttttgatcagcagctgtgcgaggccgtagttcaagtcatcaagatagggcatgtactggcgcaggtattccgcctcggagagatcgccggaatggctggtttctcccagggcggggttgatcaggaaccaggcgtggccgttgatcgctccctgcagcaggtgttcccaaagtttgtatggataggatgaacgctccgagcaatacccgccccaccagatggtccggacccggtccgcgccgaatgcgcgcaatgcctcgttctcctgcatgccgctgtaagggccccagaagtccagccctttaatcatttcttcaaggttgccgggaggggagccttccgcgcctacccgggctccgggatgaacctttttgatttccgccgccaggaaatgatgcatgtccacgtacattttttcaatatattcccggtggtcattgtaagcgaccagatttcccgtttttttggccgcgtccagccggaggtggggcacttcaccgaatccggcataggaggcgccgtattcaaggttcaagttttccatggtctggtacttctgccgcaggaaatcggcgaacggctgtttatccgattctccgaacccggcgtcgtaagtgtaaaaattttcgtcgcccaggttgtacagcatggggctcaggtctttcaggtattctgcctggcgtcgcagatcgtcgctccaaagtttccggaccaatggatggtagaatgattcgtcaccgttcaacgtacccagctgctccatattttctttctgttcggaccacagcttgcgcaataccctggtttcattgttcggcccggcttccatcccgatccggcagatgtacggacacagtttttcgttccgcagggcgttttcaatatctcccttggtgaaaaattgcagggatacgttccagccgaggcggtcaatgatccgttccccgaaggccgggttgaaggtgcagccaacctggccccaggtaagctggagataatcctccagggaataatccgggaaaatcaccggattttcagcatgtgccgcattgccccgggcatcgtaaacggtgcaccgcagataaccgccgatggtcggcatccggtaattttcaaggtcgaatgaaagctctttctttccggcttccaaaggaagggtcttgctgaaccatacattgcggtagggagcgtccatcagctccactttggcggaataaccgtcctgcgcgggtgaagccagtttcaacgtgacggagaaggggccgcggtcctgcaccagcctgggcgtttccactgatacggccccgaaagcggattccaccgtaaagggaaaggcgccgaagttgaccagcgcgccatcccggcggaccaatacgtctgcggtatatcttcccgccggaaggttcgtgaaatcaaggctgttccggatgacggaattatccgcctgccggatacggcccacagcaacggttttttccggaggggttacggcaaatttgccgttgtcctgccgtactgagaatgccggcagttccactccgctggcgtaatagagcacctgggccagaaaagcctgagacgtttcatagaggaagaaccagtccgtggtgtagctgaaatacggcgtcagccccacccctggccggtagcccgcgccgtaatcgacttcaacgatccggccattgccgaactgccaggcgttgaaaatacgcgattcaaagtttttaggcctggttccgggaaggctgttgcttccggcaacccattccggccggggcaacggcttggcgtacggttttttataaggcagtttcttaagttcggaccagggttcgccggattgaatccggaccaggccggttccgttccgcaccatcgacatcaggcggaatttctgctcatccggcaggaccgcaaaatcgacgtttgccacgaccaccagatcataatcctttgccagtttggcggccagttcctggcgtttgtcggcggtgctcagccccgcaatcggattgctgtaaatatcgtccgctccgatgctatgttcattggctgtgagaaccacttcatattcaaagcccgggaagcgctggaccagctcaatgatctcgcgcgaggccgtctgctgcatgataaaaagtattttcttatggggaagctcgcctttttcatcccatgcggcatggggcgttttcagggtcattccggcctcattaatgtaagtgccgtccagtttgccgaatacgggagcaacaaggcccgtcagcaggatgcagagcaatagcggtaaccgtttcatcaattggtatctttcttttttgagttaattcaggctttcttccagggcaattttccatttgagcgcccggcagcgctctttcaggacgtaaaggcgccttaatccgctgaccgtggttttttctttctccagaacacggcattcacggttgatcgcatccagttcttcccggtactttttaaaagcggatttcccgcaggcccgtgccagttcggctgatagcttttcaatttccgcgaattcattgttcttcacctggccgggttccgtaaggacacttttacctttatctcgcaggatcagggtgtcgccagccatggcgcaccatggctcttccgcggaacgcgacagcagggcggatatcttttccggcgagacggtgtcatttgctccctggaagtaaatatagccgaagttgcgcgggctcgaatatccgcccagcaccgaactggcggctccggcaaaatttccgccggagtaggcataacggacgtggcagaacatccagatatcggacgtttccgctttggcgggcaggtcgctccaggggaaaaacgcttcaatcgtccagcggtccttgccgatggaggtccgggcggtccagtcggtgccgctccagtcattctgataaacggcggcgtcccggcggcggaaatcggcgcgcgttccgatgcaattgaccttgaaacaatggtagcttattccattggccctggcatcgaaaaagatttcggcgcagtcgtcggtccaaatggcggcgttgtcaaagtcggtaatgatcttcctcaatttttccggatgctcctcgaaattgatgatgcccaggtagattcctttttcatcatacagcatacggaattccgtcttgagttttcccggagtcggctccgcgcaattgtaaacataataatgacggaatacggccgctttttcccaggctgcctcgttcaggcagccgtcgaccaccggcgcttttccctcaaccgggctgacgacataaaaggaaagctcgcggggaggggcggagagcgccagtccgctgaccaggctcagtataatgaagcttaatttcatctctttaacatccttgaaatgccgtttccttatatatcatgaccctattgaaccgggtactatgcaagccgtcccggatgaatgcggagggataagtggccgcggcatcatgccgggaatgacccagcaacacatgccgcggccataaaattccatcaaaacacacggttggacatattcttactatacccgtttttcgatttctttctttcagaagaacccggaataaaaatagcggctcaagtaaaaataaaactgcaacccacaagattgctgaatattttactcaggaagaaaacgatttttgcttttctatccatgcagtatcattacaactctttaagcccttcattttccacgtacccataacatggaaaggacacggatttccacgatcttttaatcggtatccgatggctgttggagatttttgaccatgccgtaagagtgagctggctgcatgggtgaatcccccggcatcttcctgagcttcaggattcgtacgtgcagcgtcccgtcattcaaattccacttctttttgtaagctccctgtttatgccagttgccgcaagggcgcgcggcgctccatgagcgtgtttggagaagatgcgggggaataaaaaagaggctgtcccgcggatgggacagcctctgctgttgagttgacgctcagtcaggagttccgcttaggagaagctcttgatgaggatctggcgctgttcttccagttcggccgggagctttttgcccaccttgtcgaacagttcggtctggctttccagttcagccttccattcgctcgggttgagagccatgttggcgttgaactgttcttcgctgtagtcgatgccggtcttgtccagttcgtcgtaggtcggggagacgcccagcacggtcttctggccttccgccttgcccttggcgcggcggaggatccagtcgaggacgcgcatgttgtcgccaaagcccggccagatgaagttgccgtccttgtccttgcggaaccagttcacgttgaagatcagcggaggattggcaacggtcttgcccatgtccagccagtgctgccagtagtcgcccacgttgtagccgatgaagggaagcatggccatcgggtcgcggcggacctggccgatgttgccgaaggcggcggcggtcatttcggaacccatcgtagcgccgacgtatacgccgtgcgtccagtcgcgggactggaagacgaggggcatggtggtggcgcggcggccgccgaacaggatcgcggagagggaaacgccttccgggttctgccattcggggtcgatcgtcgggcactgggcggcgggagcggtgaagcgtgcgttcgggtgagcgcacttgcggccacagtccggggtccagtcattgccctgccagtcgatggcgtgggcgggagcggggccgtccatgccttcccaccagacgtcgccgtcgtcggtcaagcctacgttggtgaagatgacattttccttgatggtgtccatggcgatcgggttcgtcttgtaggacgtgccgggagccacgccgaagtagccgttttccgggttgatggcgtggaaggtgccgtcttcatggggccagatccaggcgatgtcgtcaccgatgatggaggtcttccagccggcttcacggtaggaggcggggggaacgagcatggccaggttggtcttgccgcaggcggacgggaatgcgccgcccacataggccttcgtgccgtccggggattcaatgcccagaaggagcatgtgttcggccatccacttgttcttgcgggcgatggcggaggcgatgcgcagggccaggcacttcttgccgagcagggcgttgccgccgtaaccggaaccgaaggaccagatttcttccgtttccgggaagtggcagatgtatttttcttcgttgcagggccacggcacgtcgatctggccgtctgcaagcggggcgcccacggtgtggaggcagggaacgaaggttccgtagccgtcgcgcttcgggttgccgccgcccttgacttcgtcttccagacgcttgagaacggtttcgcccatcttggtcatgatgcgcatgttgaccacgacgtagggggagtccgtgatttcaatgccgatcttggccaggggggagtccaggggacccatgcagaaggggatcacgtacatggtacggcccttcatgcagcccttgaagaagcccttcagtttggccttcatttcaacggggtcggcccagtggttggtcgggcctgcgtcttcttccttctcgctgcagatgaacgtgcggtcttccacacgggccacatcggaaggggtggaacgggcgaggaagcatccggggcgcttctcggggttcaatttgataaaggtgcccttttctaccatcatgttgcaaagctcatcattttcttcctgagagccgttgcaccaatagatggagtcgggttggcaaagctgggcgatttcgtcgacccacttcttagctgcttcgtgagtggtactcatggtggaaatagtgtatgcacggaaatggccgttggcaagtctcccgtgcggctttttatggggcggtttggttgctcccggaggggaaaccccgtgcaggggaaggcgttgccctgattccggcggtggccgctccggagcgttccgcgggggctcccgtttccccgctgctgtgctccgggaagggtgaaaaagcctgttttgactggaaatctgcttgccagctcgcgccggatagtctagggaagaatcatgaatgttagaacgttgatggcaaatgcggtgtttctggtgctgccggccctgctggcggcgtgttcggacgcctcgcgcccgcccgccgtcagcttcaagattcagaacgttccccccgtgccgcgcaccatgtcccagatgtcccgggaagtgcacatcagccgcgatttcatgtccccgcgctcccgcgcgcggcgcgcctcccattccatgcatccgcgcttcatcaccatccacagcacggccaaccccacgggagacgccgcggcgcatgcccgtgcgctgaaaaggggggccatgggttccctgaactggcattttacggtggaccagtaccgggccatccagcatattccgctgaacgagacggggcgccatgcggaccgcggcggtcccggagacatgtattccatcgggattgagatgggggaggtgaggagccacaaccccatcgtcacctggaaccgttccgccaagctgacggcggtgctgatgaagcagtacaacattcccctccgcaatgtggtgccccattattactggacgggcaagaactgcccggccccgctgctgaccaacggccgcccggggcataaatggagctggttcgtctcccgcgtggattattacaggcgctgtctggaaacccgccccgccgccgctctctgacgggcgcgcaggcatgatgcgatctgtgaggaatacgcctggacccatggccggagagctgcttttaacgtcccccctggaggagtgcgccttcatccgccccagggagctggcggccatgcaggcggcgggaatggcctccgtgcgggatttgctgttcatgctgccgcgcaggtatgaggaccgccgcatgtttgaccgttatgattccctgtcatccggtgcgcctgtctgcctgagggggcgggtggtggacgtgggctggaaaggctggggagggaagggcggcaagggccgcgggcggtatgtggaagccgtgctggtggatgagcaatctttggggcaggcccgtttttcctgcctgtggttcagcatgccgggcatagccaggatgctgtgcgccgggcaggagatgatcgtgtacgggcgcgtgaagccgtatgggaagaagctcagcatcgtccatccggattttgagatcatccgggaaggggacgaccagtccatccatttgaaccgcattgttcccgtttacagcggccgcatggggattgccgtgcgcaggctgcgggaaatcgtgtgggaggctctggcccggctttccccggctccggaaccggagatttacgagtttgtgccggacatcccgtgcaaaacggcgttgagggacctccattttccggagaccgcggaagtgcgcgaccggaccaggcggcggtttgcgctggaggagtgcctggcgcagcagttgaacgtggcttacaggagaaggcgagcggatgaagtgcccggcatgcagacggcaggctccagccatctggtgaaggatttggcggattcactgccgtttgagctgacggaggcccagaagcgctgcgtgagggagatttaccgggatatgaaggcgccccgttccatgaaccgcctgctccagggggatgtagggtccggaaagacgctggtggccctgtgcgcgatgctgctggctgtggaacacgggtattccgccgtgatgatggcccccacccagattctggcggaacagcattatttgaagttccggcagatgctggacaagctggacgttcccgtgtccctggtgacggcggacaggaaggaggaatcccacgtatccttcgggaagcagggggggattgtggtcggaacgcatgccctgctgtacgggaagaacgtgccggaacgtgtgggcctggtcgtgattgacgagcagcacaaattcggcgtgaaccagcgggaaaagctgattgaccgcgaagagcgccccgacgtgctggtgatgaccgccacccccattccccgcacgctgacgctgactttttacggggagctggacgtttccatcctggacggcgttcccggaggccgtggcgcggtggttacggccatccgcacggagaaggaccaggaaaaggtattgaagttcgtccggagccagttggaggaaggcaggcaggtttacgtggtttcccctctcattgacggggaggattcccggaaagggaaagccgtgacaaaggagctggacgagtggaaggcgctgctgccgcatgtggatgtgggactgctgcacggcaggatgtcctccgaggaaaaggaggcggtgatgaaggacttccgcgccaaccgcatcagcgtgctggtagctaccacggtggtggaggtgggggtggatgtgccgaatgctacggtcatgattatcaataatgcggagagtttcgggctctcccagctccaccagctccgcgggcgcataggccgcggggcgcacaagtcctactgcatcctgatgacggaggcccggccggaggatgaacaatgggaaaagctgcatattgtggaaaccacggccaacggttttgacctggcggaacaggatttgaagctccgcggtcccggggacgtgctgggcacttcccagagcggcctgaagggcgtgcgctttgaggaatggctgctggacgcgcgcctgattcaccgcgggcgggagctggcggaggccattctggcggaggaccccaatctggaatccgccaagtaccgccccctccgttttctgctggaaaacggggaggaaaaacgtgtgacggggtaagattgtcttcctgccgtttgctgacagtcagacggtaaggactgtatgacagatatggggtgcaacggtttctctcttggaatgaatctaaagaggcaaagaagatatttcttcttcaacccgaacaccgataaaacaatgattcaaacgtaccaaatactccccgtggtggccatcgtatgctccgcctccgctcttgctcagaacgctgccgatcccgtgcagatggttaagcagaatgtcgacctgatttcgtccgccaacaaggttctggacgacgtgaaggacaatgcggcggttgaaatcgccatcaagcagctcaatgccctgacccagcaggccaagcaattggacaaggccatggaaaaaatgaagctcacttccgaacaggccatccggatcaccaaactgaacggagatgcccaggataccatcgtggacatgctggaaaattgcgaacgcattcagaaggacaagctcatgacgcccgccctgctcaaggcggtgaacaatttcgctgacgccgccaacattgaagtggtggaaacgattacgaccgtggaacaaattgtggaagactaaatgatcagcttgtaaagacctttgactggtagggccgctccctgaaaggagcggccttattctttggtgggaaaggcgtctttaacaagtcttccggcgggatttcatgcttccatggcggggttgggattcccggccggggccaggtatcccgttccggggtccgtgcccagggaggaaagaaggctcctgtggcgcggcagggatttggcgcgggagacggcggcggcggggtccagcacgttgccgaaggtgatggcgcccatagggcaggcgagctggcaggctgtttgcgccgcgccgtccggcaggagcaggtctttctccgtcacgtggatggaagtggagggctggcccgggtgttccttcatcaggcgggatttgtgcctgattttggcgcgttccaccatctggacgcagtaggtgcatttttccatgacgccgcgggagcggacggtcacgttcggattgcgctggaggcgcgtggcttccccggaggccttggcataatcaaaaaagttgaagcggcgcgccttgtacgggcagttggtggcgcagtaccgggtaccccagcaccgggcatataccatggcgttcaggccctccgtggtatggacggtggcgttcacggggcacacggactcgcacggggccttgccgcactgctggcaggccacgggaatggcggtgagtgcccctgcctccgtgaaataccggtcaatgcgaatccagtccagcgcgcgtcccttcgccatctggtcacggcccaccacgggaatgttattttccgcccggcaggcgatcacgcaggcattgcagccgatgcagcgggacgtgtcgatcgccatcctccattggtacacgccctccgcgccggacggcgtgaacggagccggagaggcgccggactgaagggcgaagggggagggctgcacgacggggctttgaacagcttccgtacgttccggaagggcgcgcagggcggcctgttccggggaaattccacagcctgccgtttttttcacctgactgcggaatgcataaccgtcggaattctcctgcctctccgctacgtggttcatgccgccataccccaggggaagaaccatcagattctccgccactccgggaatggggcaaaggatggcttccatccgtccgccggggacggtcagagtgcagagcatcggcccggaatccacgcctcccagccgccggaaggtggcgggggaaacctgtgcggacgccgcccagctgacgcccgttacggggtccgggcattcctgcatccaggcgttgcgcttccagcggccgtccccgatggaataatccgggcagaattgcagttccagcaggccgttttccaatccgcttccgccgttgccggagggagcaacgggcgcttgctccatggcggttccgagggctgtttcttcctgcggggacagggggggataagccgtttcttccgaatagccgtgctggagcgcctgtgtccaggccgcagtcttgttttccggattcacggcgcgttcaaaacatttgcgcgcccggtggtaaacgggggaaaggtgcgtgggcgaattgtccgccgtgatgaggtgtcccttggtggaaagcagcccggaaagcacttcttccgcagaaatgcccccgtacaggggaagaatgacgggctggcggtagcagaatctgccgcggcagtcccgttccactccccatgattccagaaaatgggccgccggcaaatgccatcggcaggcgcgtgaggtttcatcctcatacatccccagatgaatgctctccgttccgttcagggcttccgccagtgcggagccgtgcccggaatccagcacgggatttcccgaatccagcaggaaggcgatatccacctctttcttccggatatcccggatgaaatcctccagcgttccgtggggcggcgtggacggagccttcaacaactggacgcacgttccgatagagccgagaaggaggttgagcttccagacgcttgcggacagttccggatgattgtcccccagcaggaccacgctttctccgggatggctggataaatcgtccgcgcagtggcggagccaggtgaattccctttccgtcagggagcggtccgtctgccggggaggctctagcgtctgaagggaggtttttttaccggagagatagcggaacaattcctccagaaagaccgccaggcgcgcgggggaaacgggcagcctgtggtcggcatgggctccggtcagggaaacgcggccctccacggcgtaaaggcgcgtgcggttccggttttcttccttgtaatggaggccctccggggaacgggcggcaatgaaatcacgcgtattgccgtagggattctcatgaaggaaatcgcaatccagggcaaggatgcgtttggcgcgtgcgaaacgcacgcggaagcgggccttctgcggcaagcctgcctgcatgccggagcccggcgtgggaacgggagaatagcggtaaatccgcacgccggggtttttcctgccgatttcctccagcatggagtgcatcaggggagaatccgtggcgggaagaaggatgccgatatggccgccgtcccgcaggttgcgggaccaggaggaaaaggctccgcggaattcgtccccggaagccggcttgccgttaaagaggatatgcttgctgcggcctgggtcgtaaaggtccagaatggaagcctgggccgtggccggcaagcccgggccttccggatattgcagggagggaagcagcttgacgggacgcccttcataacaggcggccagcacgggcagcgcgctcccgcccatggccaggcaggtggcgtaagccgtttccacgccgggcacggaccattccggtccttcattatagggaaccaggtatttttccacacggcggcaggccggaagccccacccccaccaggactgcgcccgcgcccatccatttcatgaaggagcgccgtgtcatttcccgctcttcttccggaagaaaagcggggtggccctggggagcttcattctggtgaaatgggggaaggggagtcaaaccggaggatgatgtggattaacgggaaatgggaacggcttgttttaggcaatccggaaggtgaaatcaagcggtgattaccggctgcacccatcttcagggcagcggaagtccgtggaaaaagggcatccgtcctttttttgacggtatccaatgtaattcattacggcctcaagctggggatcgttcagcaggatggccctggattcataatccccgcaattttccggaacgaggggaaggtagtccatggcgtcgcaggtttcaagctggccgcggaggtccagcgtcagccatgccggcaggagaaaacggtatccctttggatcggtaaaaaccagggcgtcccggcatgcccggatcatggaaggggtgatgcggcgccagtcggtccgctcttcacagggaccgatggcgtcacaggtttccctgggggcgtacatgtcgatgagttccgtcgtcatcaggccgatgccgtcttccagaatgacgccgtcaaaggcggaatctatttgttccaggagaagttcttcttcatgcgaaacaggtttgggggcggggaaggggttggaaaattcctgctgaaaataagccagaatatgcgggaccgcttcttccggagggcaggagtaaacaatgccgaggtccaattccataacttcatcatacagtaacggtccggcattcatctatcgcgaaaatggaaggtatgatgactggaaaggcatgtttgccgggagccggcctgcgcccggtggtcaatggtggcaggcggtgcagtccattcttggctgaatcttccactggtgtttcaggaaatctcccaattgaagcggagtttggatgcggtttccctccccgtcccggatggaatgcgtgcgaaggtaatccgcggcggaataatgggagctggccgtctcctccagcgggcgcaggtgcggggcggggtcgcggtggcagtccaggcaccactgcatgcgggcatcgcgcggagcgctgatgcgttccatgcctgccacgtccccatggcaggaagtgcagccgatgccgcggttcaggtgggccatgtggttgaaataggcatggccggacaggcggttgaccatgacccagcggaccggttcccccgtatagccgggaaattgggggtccgccgccgctcgcagcggagcgatgagcgggctgtccgggagaatatgctggtggcagcccaggcaggacttcgtatccggaatgccggccctgggagagcgctgggcggcgctgtggcaggccgtgcagctcatcttcaggtctccggcgtggagcttgtgggaaaaacgcaccggctgcacgggttcatactccggaatctggaaattgacgtaatacaccccacccagcgccagcgcggcggcgagcgcaatcagcgcgacgcctccgtaaaagcgcctgttggtattgggtggaaagatgttggccatggtccggtagagagaaaaggcgggacccgccgtcaggccgctctgcccggccgcggaatgcgggcgggaggcagaggcgtatccatcgtcaggtcttcaggcaccagccgcgtggcgctcttcttaatctgttcccaggtgatgcgctgcccggtatgggccgcttcacgccccatgatggcgaccagcgttttattggccgcgctttccagcgtttgtttccaggttccggagcggaggaaacggtaaaaggccacgtgcgtgtccgcgtacatattgccccgttccccgcggaaacgccagcgcttatccgcctggatatgggggcggtacggggtgaccagcatccctttttcacaaaccgtccggtccacgatctccccgtggcagcctacccactgcctgcatgaaatgtgggcggccacgttgtggtcgtactcgaaataaacgtcgtaatggtcccacacgtcgccgtcgtcccggcgctgggcgcgtcctccggagccgaaggccgccagcggaagctgctcgttcatggaccataccatgccgtcgatcgtgtggacgatctgttccacgaactggccgccgctcagccagttccaggcggtccagttgcggagggcccacgccacgtccgtatccgaggaagggcgggaatccagagccagcggggatttggggggcgtggtgtaatacagcccgtcaaaggaaagcacgcgtcccagttctccggaggaaagcttgcggtgggcttcctcattcgccttgtcatagcgccagcagaacccgtccagaatcaccagatttttaagctttgccagacgcgcggactccagcacggaaagcacgccgggaacgtccaccgccacgggcttctccgcataaatgtgcttgccggcgtcaatggccgccgccagatgctccggacggaaggcgggaggcgtgcagagcagcaccacgtcaatatccgtttgaagcagcttcttgtaaccgtccaggccgtcgaacaggcggctcttgtccagctggacgcggctgccgtactgttccgtcagcaaattggagccgaaatcaatccgttcccgaaacacgtccgccagcgcccagactaccgttccggggtcggcgtccagcgcgttcttcatggcgcccaggccgcggcctccgcagcctaccaggcccaccttgagcggtcttgcgtccgtcagggcttccgcggcgttcagacagggcatggctgccaggaacccggccgttccagcggcggttctcaaaaaacggcgtctgttccaaatagggtaacccatctcagcggaattatacggcgtcagcccatggaatcaaacgctgtattgaaatggtgacgcaaaaagtagacgcaacctccgtttccggaaattgcgtctactgagggaaccaatgaatgcactatattctggctattaggttgaacagggctactccccctgttcagaaagcaaagcgcacgctgcggaatattttgtctgaaaaaacatttcgtgagagtaaaaaactgatttgactccggaatccccagtgttcatgataaatccaatgaggcctccggctttccaaccaatcatcatgatgaagcaaaatctcattccttttacagcggttttggcggcatttgcccttgtttcctgtgacggcggcaaaaaacaggatcaatccccggatgcctctgccgccagcgaacaggccgttcccaaaacgccgggagaaaaaatcctggccgttctccttcttattcaggaccaggctacggcaaacgcccatgcggcggaggtgaaggagctggccgtggcccttcccaaggacattccccatcaagaaagcgtgaacatcatgaatgaactgctccgtctggccagccgggaatgctatggctccctgtccctggaagacgccttgaagggcatccagtttgacgccggggaatacacgggcagcgtgcctctggacgtggatggctttgaacctaccccggacgagccgaaaaagtaaattccccgtgccgggaaacgatggactgtttctgcgcctttcccatcccgttcttccgggaagggagaggcgttgcttttcgggcgccggatacggaaaataaatgtcccggcttccaggctgttccggaggggacggtttttctgcggttcagggaaacactctgaatctttctcctgctggaaaaacatgctggaggaaaaggagcggaaagatgctccccttccgttctccggaatttttttgcccggctgatggggcaacgccgtaaaaaggaagctcagggcagggggcggcgcaattcttcaatggcttccgccatatcttcccgcgtaatcttcttggaaatgcctgcttcccccgccttggaaagcagaacgaagcggatggttccggcccggaacttcttgtcggacgctgtcttcttgagaaccgtttccgtatcaatgtcatccgggagaaccaggggaagttccagagcctggagggtgcaaagaatcttcttggcgtcggaagagctcaacccggctttccgttcgctcaggaacagggcggcgcgcatgccgagcgccacggcttccccgtgcaggatggtgccgtagggaacagcggcttcaatgccgtggccgatggtatggccgaaattgagcagggcgcggatatccagtgtttccaattcatcattctccacgatgcgggccttgatcgccacgttccgggcaattagatcggggagtttggcgatggtattcagggaaaagccgatggaaagctccggtcccaggcctttcaattcatggagcatggaagcatcccggatggccgcgtgcttggcggcttccgccaggccttccgccagcgtgcggcggtccagggtcaccagtgtggtggggtcgatcacgacaacggccggctgatggaacgcgcctgccaggtttttcccttccggaatattgacggcagtcttgccccctacggaactgtccacctgggcgactaccgtcgtaggaatctgcatgaaaggaatgccgcggtaataaatggaagctacgaagccggccaggtctcccaccacgccgccgcccagggcggcaatgcacccggtgcggtcaatgcccgcccgtaccagctcggaacacagttcctgggcctgcagcatattcttggacgcttctccggcatccaccacatgcaggctgggcatgaacccagcgctctccagggacttcatcacgcgttccgcataaagcggggctacgcaggtatccgtaataatcgcaatcttgccgtccagtccggcgcggtaggcaaactcacccacgcggtccagcgcgccgttttccacgtggatatcgtaggaacgttccccgagagcaagagaaatggtaggcatggggccagtatgaggcattccggaaggaagctcaaacggaaagtgcgaaggaggcaaagaagatgcaatccgcctctaatgcgtccttgtcttaggcgccagcggggaaagggtttccagaataacctttaaatgttccgcgcgtgcaggcgtaaagccgccgtcatccttccagatgatattgccgttgccgtccagcagtacaatcgcggtctccgccttcttgtggagggaaagcctgcggcgcacgaaagcctggtcgtaataggaaataagggaattggtcttcatgtagaaatccggaatatcccccagggcctgtgtaaaggcgggaacgtccccctcaatgggaggcggctgcaggaccagcagaatattgtactccaccggggtgggcgtatgcttgtactgcttgcggaggtcttcgcagaacggaagccacttcttcatgctgtacagggtttccggatgaaaaacggtcagcatgatatggaagcttttaggcacgatgggtggaagggaaacgttatcccccagcaaattcatgccgttgatatccggaaaacggtaacgtccgttccctcctccataaggatgctcggggtcgggcgttggcaagtggatttcctgattcttcatgcgcgattagacaaaattcaggcggggattgttcatgggaagggttaagtgagacaggtcgcggaaaaaagaatctccgtccgtgcgtggccttggagaaaaagaaagtaagggatagaaataaaggtatcggcaaagaaggcgagccgtcggcccttgtaaaaggaaaaaagaaaacctcttcccccttgagctgttgaaactcctcgctcggccagcccttcttccctccttcttttctccggggcgccgatatcgtaaaaaggaagaaccccccctctcgttctcgccggcaaagggaagggctcctggacctttgggaagactgctgcgccatctgaaaagaaaatgttcaaaaaaatggcacgaagaagggggagtatgacaaaagcctaactattttataaattggaagttatgaatggacgtgataaaatgggtgaaagactctcacaaaaaacgactcgaaaaaaattgacaagggaggtgaaaatggtagacttctcggcacgccaacacggcgacgggatgaaaagcccggcggcaggagggactcgaaagagggcctgaatgaagccggggccggccacccggaagagcctcattaaaggggccgataagaagatttcaagggaatgactaccgaacccgccgagggttttcccgaatgcgtcgagagacgtgtgagggagaaaaaacccaaaggagcgacctagctccgagaggggcggattggtagaagcaaggggaaagaaaaaaggtcgtgacgcgcgccgtgcttggcagagcgaagaggacttcaagagacacaacttgagggaagagctgactgaagcatggcgcagatgaaatcgaaagattccatttggtccagcaatttcaaaaattatatttgatggagagtttgattctggctcagaacgaacgctggcggcgtggataagacatgcaagtcgaacgagagaattgctagcttgctaataattctctagtggcgcacgggtgagtaacacgtgagtaacctgcccccaagagtgggatagccccgggaaactgggattaataccgcataaaatcgcaagattaaagcagcaatgcgcttggggatgggctcgcgtcctattagttagttggtgaggtaacggctcaccaaggcgatgacgggtagccggtctgagaggatgtccggccacactggaactgagacacggtccagacacctacgggtggcagcagtcgagaatcattcacaatgggggaaaccctgatggtgcgacgccgcgtgggggaatgaaggtcttcggattgtaaacccctgtcatgtgggagcaaattaaaaagatagtaccacaagaggaagagacggctaactctgtgccagcagccgcggtaatacagaggtctcaagcgttgttcggaatcactgggcgtaaagcgtgcgtaggcggtttcgtaagtcgtgtgtgaaaggcgggggctcaacccccggactgcacatgatactgcgagactagagtaatggagggggaaccggaattctcggtgtagcagtgaaatgcgtagatatcgagaggaacactcgtggcgaaggcgggttcctggacattaactgacgctgaggcacgaaggccaggggagcgaaagggattagatacccctgtagtcctggcagtaaacggtgcacgcttggtgtgcggggaatcgaccccctgcgtgccggagctaacgcgttaagcgtgccgcctggggagtacggtcgcaagattaaaactcaaagaaattgacggggacccgcacaagcggtggagtatgtggcttaattcgatgcaacgcgaagaaccttacctgggcttgacatgtaatgaacaacatgtgaaagcatgcgactcttcggaggcgttacacaggtgctgcatggccgtcgtcagctcgtgtcgtgagatgtttggttaagtccagcaacgagcgcaacccctgttgccagttaccagcacgtaaaggtggggactctggcgagactgcccagatcaactgggaggaaggtggggacgacgtcaggtcagtatggcccttatgcccagggctgcacacgtactacaatgcccagtacagagggggccgaagccgcgaggcggaggaaatcctaaaaactgggcccagttcggactgtaggctgcaacccgcctacacgaagccggaatcgctagtaatggcgcatcagctacggcgccgtgaatacgttcccgggtcttgtacacaccgcccgtcacatcatggaagccggtcgcacccgaagtatctgaagccaaccgcaaggaggcagggtcctaaggtgagactggtaactgggatgaagtcgtaacaaggtagccgtaggggaacctgcggctggatcacctcctttctatggagaaagtgcatgaaaaatgcacaggtcggatctcttcccgagggaagagagagcggaacccgcgagggcccgcaacgaaccaaagatgtgtaaacagccagttcgcttggagcgaaactaggcacgacgtgcgtgacgaccttttttcaaaaagaaccgcaactgggggtatagctcagttggtagagcgccagctttgcaagctggatgtccggggttcgagtccccgtgcctccaccagtttcggtaagaaggcgggagccggaaaactttagtaactaaactttagtatttggtaactgtctctcagagacccaaagccgggcctgtagctcagttggttagagcacgcgcttgataagcgcggggtcacaggttcaagtcctgtcaggcccaccaaaaaaaatcgattattgagggaaagcgaaaattgacatctgcgtggcaaagaaaacaattgctgagaagcaattgctttccaacaaagtgggtagttgaaaaacaactacaatacacaatttaaaacatgcataccaagaaataagacaatacagtaagtcacgaaagggctttgtggtattgtggaagtggtaaaaaacttttgcaatatgatgaagtaagtaagggcgtacggtgaatgccttggtgccaacaggcgaagaaggacgcggcaagctgcgaaaatcctcgggaagctgcaagcaagcgatgatccgggggtatccgaatggggtaacctgatcgaggcaatactcgatcgttcatacctgaatacatagggtatgaaacgcgaaacccgctgaagtgaaacatctcagtaagcggaggaaaagaaagagaaatcgattccgtaagtagtggcgagcgaaagcggatggagcccaaaccgaaggtactccttcggggttgtaggaccacgagatattcgaccatactggatagtagaacagcctggaaaggctggccgtagaaggtgaaagccctgtagacgaaatccagcgtgggaattagtggaatcctgagtaatacatcacacgtggaacgatgtatgaatcagcgcggaccaccgcgcaaggctaaatactagttggcgaccgatagtgaacaagtaccgcgagggaaaggtgaaaagaaccgctgtgagcggagtgaaatagaacctgaaaccgtatgtctacaaagtgtcagagcagagcaatctgcgatggcgtgccttttgtttaatgagtctgcgagtcagtgtttgtggcaagactaagggcttccggcccggagtcgcagcgaaagcaagtccgaatagggcgaattaagtcgcaggtactggacccgaagcggaggtgacctacccttggccaggttgaagcatgggtaaaaccatgtggaggaccgaacaggtgaacgttgaaaagttctctgatgagctgagggtaggagtgaaaggctaatcaaaccccgtgatagctggttctcttcgaaatgcatttaggtgcagcgtcacgtgctgatgcgcgggggtagagcactgacaaggctagggggcacacccgcttaccaaaccttatcaaactccgaataccgtgcaatggaacgtggcagtgagacagtgggggataagcttcattgtcgagagggaaacaacccagaccagcagctaaggtgcctaaataacgctcagtggaaaggatgtgggattacacagacagtgaggatgttggcttagaagcagccaccatttaaaaaatgcgtaatagcttactcatcgagtgatcctgcgccgaaaatgattggcgatcaagcgttataccgaagctctggactttaccttacggtagagtggtagaagagcgttgcatgcgcgttgaagggtgatggcgactgaccctggagcacatgcaagtgagtatgcagacatgagtaacgtaaagccgggtgaaatccccggccgccgtaaacccgaggtttccagggcaacgtgtttcgtccctgggttagccgggacctaagccgaggccgagaggcgtaggcgatggatatcaggttaataatcctgagctcgcgacccttaaactggggggacgcatgagaaaagatgactaggttattgaattccgagttgagtccacggactcagcgcatcattggatcgagtgccaagaaaagccccagcgtatgctaagcgacccgtaccgcaaaccgacacaggtgggtgggtagaatataccaaggcgtaagagtgaaacctggttaaggaactcggcaaattagccccgtaacttcggaagaaggggtgcctgcagcgatgcaggccgcagagaaatggcccaaccgactgtttatcaaaaacacagcactctgcaaagacgcaagtcgaagtatagggtgtgacacgtgaccaatgccgaaagattaaggcaaggggttagccgcaaggcgaagctctgaacccaagtcccggtgaatgtcggccgtaactataacggtcctaaggtagcgaaattccttgtcgggtaagttccgacctgcacgaatcgtgaaacgagttgggcactgtctcaaccaggcgctcagtgaaattgtagtggcggtgaagatgccgcctacccgcagaaggacggaaagaccctatagaccttaactgtaagctgtcattgtttcttcggttttaatgctcagagtaagtgggagacgctgaagacgccctttagggggcgtcggagtcatcaatgagacaccaccctttgaaactggaggatctaaccctgagccgtgaatccggccagaggaccgtgtcagccggtcagttttactggggcggtatcctcccaaagagtaacggaggagcgcgaaggtgggctcagcccggttggcaaccgggtgtcgagtgcatgggcataagcccgcctaactgtgagaccaacaagtcgagcagatgcgaaagcaggcccaagtgatccggcggtagaaagtggaattgccgtcgctcaacggataaaaggtaccttagggataacaggctgatcacgcccaagagttcatatcgacggcgtggtttggcacctcgatgtcggctcgtcgcatcctggggctggagaaggtcccaagggtccggctgttcgccggttaaagcggcacgcgagctgggttcagaacgtcgcgagacagttcggtcctctatcctctgtgggcgttggaaaattgaggggttcagaccttagtacgagaggaccgggtctgacgcaccactggtgcatcggttgtactgtcaagtgcatggccgagtagctaagtgcggacgggataagcgctgaaagcatctaagcgccaagcccatcccaagatgagttttccctataggttcgtggaagaccaccacgttgataggtcgcaggtgtaagtgcagcaatgtattgagccaagcgatactaatcaccaatagacttcatcatattacatcactcccgttcgtgaataacaacttgctgttgtcttgttcattggatgtatgtttaaaagtaacaccaccagccacgcagatgtcagtttacgctgattccttcccctcgtaacgagaggaaatcttcttagccacacacacaacaacccttaaaaaatccccctcaaagcccccccaagggctcccgggcaggcaggatgaagaaaatgaaaaactcttccccctgaagcccggtggccagagcgcagtggtcccacccggtcccgttccgaacccggaagtgaaacgctgccgcgccaatggtagtcggacgataggtcccgcaagagtaggtcgccgccgggattttttttcatcaggccccgccagttcctcaactggcggggcttgttcgttttcttgatggcgcgatcttgaatctccttctcttcctatactttgctaaaaggaatatttggtacatgccgcctgtccgagccgtcgcgcctttgcttcctccaagctcttcggtagaaaattaataggggggctatccagcttttcccgccattgcattactccttgaaagacgccgcggattttgcatgtatagttggtgctatgctttcacatgcttttgcagtcggttcggttctgggaacggtcatgtccccgcttgtttgcgtctctgccgcggaaatgtctcccgtagcggccgctgaaagcgtggtggctcgtgtgactccatctgcaaaaggcgccgtgtcgttccgcttgaatccggccatgggcaacaagattactatttctggcgctcctggtggcatccgggtggaagcatctgacgtgcgccgtctggtagcggggtacggatggtatctgaaaaatattgccaaggtgcatttttcatggaacggagaccgcctgacgcttccctcacccctgcctgctccgtccacccctgtcacgattgagtccccgtggaataccgtttttgcgtataattactgcacgctgtcctatacggcggctttctgggactggaaccgctggcagcgcgagattgattttctggctctgagcgggtttacgcacgcgctggtgacggcaggcctggagaagacctgggaggatttcctcattggcttgggatatccccgtgaaaaggctctccgcttcatccccaatcccgcttttgccgcctggtggaatatgggcaacctggaaggacacggaggaccgctgacccagcagcagattgacaggatggcgcagctggggaggcgcatcgtatcccgcatggagcagctgggcatgacgcccgtgcttcagggttatgtggggtttgtgcctgcggattttgcggagaacgtgcggatgaagggcctgaagcttatcccgcagggggaatgggtcaatttcaaaaggccatgggttgtggaccccacttgcgaggcttttccgaagctgtccgcggactggtacaaggctctccgcaaggtatacggcatttccggaaagatgttcggcggggatttgttccatgaaggcggctgcaagggcgacattaacgtgacgcgcgcggcacaggcggtgcagggcgccatgcagaaggcttcaccgggttcttcctgggtgatccaggcctggggaggcaatccttcccgcgagctgctggccggtacggacccgaagcatgctcttgtgctgcagctcaccaaggacatggctgacggtgggaagaatttgaggacttttgacggcattccctgggtctggtgcgagctggccaacttcggcggcaatacgggactatacggaggggttccccttctgtcccggctggggagtgatttggccggctacagggataagggcctggtgggaatgggcaccttgtccgaagggctggaaacgaatcccctgcattacgccctcttcagcgaccgtttatggacggcggaggatattcccgtccgggactggctaaggaagtatgcgcgccagcgttacggcgccgctccggcagcggttgtgcgggctttggaaatcctgtcttcctccatttacaatcccgcccgttcgcaggaggggtgtacggagtccattatctgcgcccgtccgtcctgggacgtccgcaaggcctccacgtggtccagcggagagaggtattaccatttgggcgacatcgttaaagcggcccgcggttatttgaaggcggccaatgaccagccgtccctggtgaaggaggagaccttccgctatgatttggtggatgtcgtccgccaggcgctcgcggacgccgctttttaccagctccagcgggtcaggagcgcttttgacgccggagacgtacctgcctacaggaagcaggtgaagcttttcctgtccctggtttcggatatggacgccctcctggcgacggacagccagttcctgctgggaacctggcagaagaaggcgctggattgggggagcacccggcaggagaaggccttgatggacaagtccgccaagatgcttattaccacgtggattgaccaggctccccgcgcgctgaatgattattccaaccgccagtgggccgggcttgtggccgatttttatctgccccgctggaagaatttttttgaatcccagctggatgtgctgactggaaagaaggaccgtgccgccgcccaggccgccttcatggataagacggtccgggaggaattggcctttgccggaaatggaaaggtgtattccacgaagtcgtccggggatgctctggccgtcgccaaccgcgtgatgaatgcccaccgggaaatgctggacgccctgagcgcggaagaaagacattccacgggaactccgtgggacctccagcagggatccccgctgcaatttaacgtgacggaccaggtaaccggaccaggcacgtacaccgccaccttccagtggaagaacggccccagcgccctgaagattcattccgtcaagttgtacgaggggaacagggaggtggccgcagataaccatgaaggctggaccggcgtggagaataaggataattcctacaggcttgatctgaagaagtaccgcaccaacctggattcctatatcctgaaggcggaggtgagcggcgtttccccaggagattccaagggggaaatgacgttgaagaagaaagcccgctgacgcgccatcggccctgggctggaccttcggaatatgcttttttccggagagccggagtccgtcaaggtatttagcgtgccgcctggtaaatgctgaacatcaggatggccatgcccgtcagggccgcgccggcaatgatgccggaggcggtggggattttatattccttggatttggccttgaaaaagcggtccgcggcccagccgagcacggcccctgcaaagaagaggaaggagtcgttccactggatggcccaggccagcccgaagccgatgggggtggggagccattttcccgcggcgggaaggtagcgggggacaagcaccagaatgaggccgaggatgccgcccgcgatgatggagagaaccttgatgctgtgcaggtggctgaagcccatgcccagcgcttccgccgtggccgcccatgttctggctccaggagcattgaaggcctgaagcgcgtccacgtctgggaccatggagcggaaggccagcacggagacgagggttcccaggaagattccggaaaactgggcgatgaattgcttgcggggattggcccccagcaggtagcccaccttgaggtccacgagcaggtctgccgaagaactggaggctccggaggtgatgttggccgccatcaggttggccgtcacgtgtcccggcgcgattccgccgaagatgagctgcgtgactttccccatggctccggtgggcgtgatgttggcctccccggtgatccggcagacgaccagcgccaggaagaaggagatgactactgcaatgcagctcatccagtacggaacgtcaaaggtgacatgggccaggtagccgagggccgccagggagacgagctgccctgccaggaaccagctcatgggcgtttctattttttccacgtccgtcagctcacgccttttggtcagggaaaacatggcgcccagggaggagaaggagcgggcgatgcttttccattggaacaggaaggccacgatgctggcgacgaccatgcaggcggttcctccccacagggtccagcctacgctatcccggtagcccgctcccgcgggaagcagtccctggctttccagccacggtacgtaaagcgcccagcagaccgtgcccccgatgaagaggctgagggaagttttcatgcctaccagcgcgcccgcgcccacgaacatgaggtcccatttgaagaaaatggtgcgctggtaccagttgcccaggatttgctgctgggcggcgcccagccattgttcccctcccgccgccatggcgatggcgttggcggaggcgaagagggcggagtaaaggagcgctttggcctgtccagccgcctttttgccttctgaatagagcaccttgagggtttccgccgtggcgatgctgtccggaaacctgatttgctcaatgttgatcatctggcgcttcatcggaatggccatcgtgacgcccagcacggcaatgaagaatatccaggcgaaggtgacgcccagcggcatgtgctgccccgtcagcaggagcagggcggccacggcggaggtgagcgtgcctcccgtggagtagcccgcggagctggcggcggactgcatgcacgtgttttccagaatggtcatgggggatttggagatgcccaggcgcacgaaggcgttccacagggcaaaggagatgatgcccgccgtcagggccaccccgaaggaccatcccatcttaaggttggcgtacaggttggtgagggagaggatggagccgaggagcattcctacgatgacggctctccaggtaagctgcttcattctgtctccggagcccaggtagacacggtcataccattgctgttcgatttcatccggcgtgccccggaagccgtccaggggcagcggcttttccaggcaggagagaggagcgggggaagactgggattccgttggtgccatacgggccggaacatagcatgtgcgggcgcggtggaaaagccgtatctgccttttcctttcctccggaacgccccccgcttggggcttgcctgcccgtggagcccgtggtttaatgaacggcatgagccaatcttttacggataaacttgccgcccgcatcagaaagaccggttccgccctgtgcgtggggctggacccgcgccccgtcatggatgatttgcagtcggttccctccctgttgaggaaggtcgtggaagaaaccgctccgtatgcggcggcgttcaagccgaatatcgcgtattttgaggccatgggcctgcgcggcctggagatgcttgaggaattgctcccggatatgccggaggatgtgcccgtggtgctggacgccaagcgcggcgacatcggggagacgcagaagtattatgcgcaggcgtattttgaacgcctgggcgtggatgccgtcacattgagtcccttcatgggttatgatacgctggagccttttctgaattatgaagagaagggcatttatctgctggcggtcacttccaatcccggttccgcggacgtggagaggcaggagctggccgacggccgcagggtttatgaactggtgggggacatggtgcgccgttccatgcaggaagggcgcaaaacttccgtaggcatggtggtggggctgaccaatgcggattcctccattctggagcgcattccggacgctcccctgctgattcccggcctgggagcccagggcggcgatctttccagcctgagcggttccggccatgcggccccccccctgattaacgtgtcccgcggcatcatgtaccagaatccggagcttggctttgcggaaaaggccggcagattcgcccagagcatccgggaggcattgggttattgatgtccatgcgtttttccggcagataacaaaatgataacgggctgcttatggcggtgcaggcgcttgtcaaagggaagggcgctggtatattgaacgggcactgcccttctccctgcccgttttttatggatgaaaagcccggaattgtaagattcacgccccgttccacttccaagtccgccatgctgattgcggtggcggtggccgtgggcgttcaggtggctttgtgcgccgtgctggtagccattcattttcaggagctgtggctgcccgccgtgcagaacggggaggtggaaatggagtttgtgcctccttccgaggaggttcttcaggagctggcggaagttcagcccgtgcccgtagagccggtcgcggccccttccacggtcagccccgttccggaaatttccgcggatgaagacctgcttgcgatgaagctgccggagaatgaggattgttccgacatgaaggattttcttccggaggagactcccacggagtatttgccggaggagctttccagcatgcggatttccatgagggaggtaaagcccaggcgtcccgtgaagactccggcggtttccctgccggggcagcctagcccggatgagaacgtgactcctgataaaaaggtgcgttataaacatgctccgtccttgcccaattccgtcaattcttctagagtcgggaaggtgaatgccgtggtgaaagtagtggtgggggtgaatccccgtggcgaaccttcatccgtcaatctccttcaatcaacgggaaatgcggaactggaccgtcttttcatgcgctgggtgaaagagaattggactttctatccggcagaaaaagacggcgcgcccattgcttccaaggtggtggtgcccgtcaggttgaatatagattaacctgcgcaggagataagagagatgcttccggagaaaatagagaaaaggcccatttacgtgatcggccaccagaatccggatacggatgccatttgttccgccatagggaatgcggagtttttaagaacccatggcgaacctgacgcggttgccgccagatgcggggagatgacgctgaggacatcctgggtgctggaaaaagccggggtgccggaaccggtgctgattcatgacgtgacgcctaccgcgggaaccatctgccgccgtgacgtgatcagcgtgagtccggacgacacgttcctgacggcttaccgccggatgacggagaactcccttcaaaccattccggtgattgacgcggaccacaatctttacggcctgctgcgttattttgatttgctgagcctgctgatgcccctgaacatgacggagatgaatgtgcgctccgttttttccagcctgagcaacattgccaccaccattgacggcaagtgcctgaccggggagaccctgagcgaggaggaaacgcagaatattcttctggtgggtgcttccagcgagccgagcgtccggacgaggcttgccaattacaagagaaagggcatcgtccgcgatctgatcgttatctgcggggaccgcccgaatgtccagctgtatgccgtggagcacggcgtgcgcgctctggtgaccacgtccggggctttcccttccctggatattattgagacggcccagacgacgggtacatgcattttaagcaccccgtgggatacggccagcgtggggcagcttatccgctgctcccggaaggtgagggaacaggtccacaaggattacacggttttcccggagaacatgccgctgcccgagttgaggcaggccgccgtgaagcgcaagcaggcgctgttccccgtgatgagcatcaagacgaacaagatgatcggcgtgctgagcaagacggatctggtggatccgccccgtacgcgcgtggccctggtggaccacaatgagttttcacaagccgtgaagggagtggaggaagcggaaatcgtggaggtgatggaccaccaccgcctgggcacccagctttccacacgggacccgatccgcttcctgaatgaacccgtgggctccacttccaccctggtggcgcgcaggttttaccaccgtgatgcggagccttcgcaggcggtggcgatttgcctgtgcgccgggattctttcagatacgctgaacctgacgtctcccacgacggcgcgggcggaccgggaaatgctggaatggctgaccggcattgccaggatagacgccaagaagttcacggaggaattttttgccaccggttccctgctgcgttccaaaacggcgccctccgcgattgtccaggcggacaggaaaacctttaccgagtacgggcacaagatcagcatttcacagattgaggaaataggcatgttcggcctgaaggaagttcaggatgatctggtgaaggagcttcagaagctggtggaagaggaaggattgaagctggcgtgcctgttggtcacggacattgtcacgcatgattccatgctgctggccgtcggggatgaagaggtgctggagcacatcgagtacgagcggctgggccccaacttgttttccgccgccgatgtggtcagccgcaagaagcagcttttcccggctatttcccgtgcgctgaaaaccttgtaggtttccggagaaaattctttccccataaagtaaaagcgcctccgtttggggaggcggatggaaaaattccttctgccggagcggaatggcgcgaccgtgtggaaaggggaatcagggcatggcaatgtctgccaggatggagcggcggacggtgtccggtatcagcacggtggcggctcgctcgggtttgagcggcggcgtgcagaaaacacggtccaggcgcagcagcgggaagttgacgggttgagtggctccgtatccggctcccttcagtttgaagcaatcctgaaaatcggcgctgagcttggcgaaaataggggattggggcgcggcgctgaagtttccggccaggatgatgggcagttcaccgtgctggcttcctacctcccgcagggtgtcaaacaggtattgaagctgtttgcggtgaatgaaccggagcgtgtggaagtatttccagcaggcgggggagtacaagtcaaagcggtgttcaaaaggctccaggctgatgttgatgagccgtatcgccagggaagaattttccggtatccagtccacgatgagtccggctgtgtccgtgatgctttgggccggaccaatctgcccgtgccgcacgatgatggcacagctgcctatctgcttgatgtaggaagtgcgtccgaaaatgctgtaggcgaatttgagtgtccggttgtggttgctgcatccctggatgaagatgacgtctgcgcggagtttggagatttgttcaatgggcggattttccacacaacccccgtacagggtgagaaccctgatttgccgggcatccggagccggcggcattttgtaatactccattcccgttctggaaatgggaggaagaaagtccgtaatgacgatgccgtacgcaaaccagataatgacgccaagcaggcctatccgggaaccgaagaccagccatgcaataagcgccgggaaggagaagatgaggcagcatgcccaagtgggcagtgacgtcatgaaggccatcgtgtccgaaccggtccagaagatggtgacgacgatgacccacaggcacagagagacgccgcccagcgctattcccaggtggttgaccccggataacgctggcagtggttccgccagatgtttgcgtcttctgagccgatgcacggtggtggtaggttaaaagcccatgccgggagggaggcccatgccgcccgtcagttttttcatttccgccgccgcggtttccttgcccttggctatggcggcattgatggtttgcaggagcaggtcctggaggaattctgaatcggacgggtcgatgatggagggatcaatcaccagctccgtgaggtttccgtcacaggtggcggtgactttcagcttgccgcccgcgccttccgtggcaacggtctgggaggccagcttttcctgggcggcggcaagtccggcctgcatttgctggacctgcttcatcattttcatcatgttcatggctgtcgtatttggaagtatgggttgatgttgtttattgggaaatgatgcgggcgcggaatatctccatggcggcgtcaatcagggggtccgtatagtaggaattatcttcatctttctcccgggcgggttcctgaacggctgcggcgggtttttcccgcggcgcctggggtttgggagaaggtgcggaggccgcgggggggggaggcgccggcagcggggccagttcttcctgaaccggctccggcacggaggaatcctggcggatggaaatggtgacggggactccgccgcgttgggaaaggtccgcttccagggccgcccgcagggggccggatccgaggctgtccattccctgatggtcggagggatgaaaggagatggcgacgaatgcgccgtcatggccggagaaaacgctgttggccagaaagtccgcctggagggggaagttggcggcggcacgttccagcgccgctttccagtcctcctccgtgatggttcttccggattgcggggcaggggcttccggttcctcttttaccatgggagcaggggtgcgggaaggagcgcttgccgtgtcgaacaggttgtcaaagaagctgctggtgcgcctttccggcgggaggttttcttcagggtccatgaaagtgggttccggagaatccggaggagccaccggggcatcggagatggcagaggcgggacgttgaggctcttccggggtgtcggaagtgggctccggccgcggttcaggtgcgggacaggaaggctcttcctgcggaatggcgggggagggggattttgcagcagttacgggaggttccggcgcgggatcagtgggctgcggttcgggttcttctgcgggagccggggctggttgcgcactggcaggttcgctcgcctgtaccgcgggagccgggaatgggttggccggggaaaagtccggaaccgggtccatcaggtgttcttccggagcgggctccggtttttccgcaggaaggggcggctgggcgtttgccggaggctccggcgcagggaccggagcggcgggcgcgggcatctcctgttcctggcgcggagcgggcgccggagaggaggatgggacggaggatgccaggggggcgccttccagcgccatgataatatcgctgatgctggcttccgcgagagcgtgaacggccttgatcaggcccatttccagatgcagccttttgttggtggaccagcgcatcttgtcttccgtttccgccagcacttccaccaggcgcaggattttgtccgtctgggtgcgtttgacgagttcggaaagttcctccttggaggattccggcagggaatcgaagctggcctccgggtcaaccttggagaccaggatttcacgcacggcggagatgatttcagagaggaactggcccatgtctcttccagcttccgcctgttcatgcaggaggtgcaggagggaggggagctccttgttcagaatcagcgccagcgcatgggctacggtttcccgggacgtgatgccgaagatgtgaagcacctgctgttcttcaatgtggtctccgcagaaggaaacaagctggtccagcatggattgcgcgtcccgcatgcctccgtccgccaccttggcgacggcaaaggccgcttcccggctcaggctcactccttccgcagaggcgatgtgaagcaggtgttccgcaatgatttcagagggaatggggcgcaggtcgaagcgctggcagcgcgacaggatggtcggcagaatcttgtggggttccgtagtcgcaaaaatgaatttgacgtgggggggcggctcctccagcgttttcagcagggcgttgaaggactccttggtgagcatgtgcacttcatctatatagacgatgcggaaattgcccctgctgggagcgaatcgcacgttgtccctcaggtcacggatgtggtcgatgccgcggttggatgcgccgtctatttccaggacgtccaggctgcgcccttccgctatttcctcgcagatgtcttcgtgcgggtcaaagtccaccctgggaccgccgctgcaattcagggcttttgcaaaaattctggcggtagatgtttttcccgttccgcgggggcctacaaaaaggtaggcgtgggcgaggcggttgtgctcaatggcgtttttcaacgtctggacgacatgatcctgtccaaggacgtcatcgaatgtcagaggacggtattttctggcaaagacctggtaactcacggttcagaaagactagaagatgagtccgtgtttgaaaagaaaatagagcgtaattgttttaaaatgttgataagagaactcttgcggtatcctgttacggagcttccctgaaaaaaatatcaagaaaacagtgaggatgacattttgatgttgaaatctgaaaatgttcatgccaatctcacaaaagtaacaggaaccttctcatctctattatttcctatgtgggtcaaagtatcaatagcagccttggtcattgctcttctcggcggagccatgtattatcttgataacgaggaagctctaaccaaggagcgtaaggaatgcgtctcccgttataagaacctgaacggtcttcgcggcgagtttacggaagaaaagacaaaatatgtcgacttcctggtgaagaatgaggctttgacgaacgatatcaacgccctgaccaagcagaaggacgagctggaagccaagaaccaggagctggccgccgccaatgaggccaagaagacggacctccaggcgcaacaaacagccttggcggaacttcagtccaagagcaaggacatggaaagtatccaggccattgcggacaagatcaagggactggaagaagaatccaagcagctggaagtagtcaagcaggcggagcagggcaagcatgacgccatcgttgctgaaacggaacagcttgtcgtgaacaatgcggcccttcgccagctcaaggcggaccaggatgcgcacctttccccgcccaatctgaaaacgcgggtttcccaggtgattaatgatttcaatgtagttgtgattgacggcggtgctgccgacctgggcgtagtgcccggctccaagctggccgtgatgagggacggcaacaaaattgccgaacttgacgtaagcgccgttgaatcccgtgtttccacggccaccattctccccagcacggtaaccgccggcgaacgtgttgaagccggagacgtcgttgtatccgttcgtccctagtcctttcccggttcaatacacaccatacactctcacatacatacacaatgaaaactgtcttagtagttttattgattcttgcagcaggtgcgggcgcctggttctccggtctcagcggcctcttcggcgtcaacggccagtatcaggacttcaaggagatgatcacctaccgcaaggttctggacaaggaaatccggaattggacgggattgcgcaatgacatgatcaagaaccgcggtttggctgcggaggaaaacctgagcctgacctccaacaaggcctccgtgacccagcagcgtgacgaacagctctccaaggaaacggagctgaaggaagaagaagtccagctgaatgcggacctgtccaagatcaacaagcagatggatgagctcaaggccaagctgaacgacttcggcgtttccagcgtgcaggaaatccaggcgaagatggaatccatggaagcctccaacaagaagcttcaggaagacattgaccagatcaagagcgctacggaagtggccgccaagaagcgtgccgagcaggctaccgagctggccggacgccagaaggaacaggccgaataccgcgccgccctcgccaagaatggagatgaatatcccgttctgtccgtggacccgcagtggggctttgtggtgattggcgccgggcagggcagcaacattgatccgaatacggttctgctcgttacccgtgacggccgcagcatcggcaaactgaaggtgacctccctggaaaagaaccagacggtggctgacatcgtcaaggacagcgtgcctgccggcatgagcatccagcccggcgacatggtgcagcttctgcgtccgttgcagtccgccaaataaggtttctgccgcgtattttccttgaaccccgctgtgccctccggcatagtggggttcaactttttaaaaggaaatgatgaaacgattcacagcctcccttttgcttacgtctttctcccttcttctggtctcttcctgctcctggctgatggagccgaaggaacgggagcgtgttccgcagccgccccccggcccggaaaagagcgctcttccccataacaagacccagagatttgaagcggaagctacgctgggaccgctggcttcgccaagacgttaaaggcgttcaaataacggttggcggtgattctgttctttacagcatcccgcaaaccggatacaaacgcttccgatttccaagcggagagatggctgagctggtctaaggcactcgactcgaaatcgaacgtgggctttaaaacccaccgtgggttcgaatcccactctctccgccagttttttttaagagaaagcccgtcgcaagacgggttttttgtttttatcaggcgtcgttccggaaggaaattcgcgggaaccgttgtttaatgatagagagggagacccttgtcggcttcccggagccggtctccgttgggatgattgtagctgtaatagtttctgtgaacggtttcggtaggttttccgatgatcacgtggtccaggaaccggacgcccaatagcttggcgcattcccgcacgcgttcggtcaggaggtcgtccatacggctgggtgccgggttcccgctgggatggttgtgcgccaggacgaagccgtaggcattgtggatgacggcgggacgcagaatgtcgcgcggatgggcgatggattcgttcagggtgccgctggaaatttccacgggtttgatgagacggcttttggtatccagcagcaggacgagtaccgtctccttgtccttccagcgcatggctgttaccaggtagtcatagacgtcttccggcgtctggataggttgccgggccagcgtttcccggagagcccgcgctcccagttcaaaggcggcgctcagcgtggccgctttcgccatgcctattcccttgcagatgtccgctatttctgcggcctccatgtgggccagggcgtccagagagcctgccgactggatcaggtccgaggacatgtccagcacgttttttcccttgatgcccatccgcaggaagatggcgagcagttccgcattgctgaggctgtgccttccctggcggagcagcttttcccgcggcagggattggaagggaagatcctggagttttcggtaggccattttagtaacagagacgtgaggtggaaagaatggcggcgggcagatggcgcagcgtgtctcccgccgtcagtgtctgctgggtggaatctccggcggagatggctatttcagaagctcgcccgcagagataggttcccagaacggcggagaccagcagggattccccctgggccatgaatccgccgcagacgcctgccagcacgtctccctggccggcggtagccatgccggggcctccggtgatgttgtagaagagaggttttccctgctgggtgacgatggtgcgggcccctttgtaaatcagggccgcttcatgctccgccaggaagcagtctgcgatgtccgcccggatggcgcagttgtccgcgtccggcagcagacggcggatttccccatggtggggtgtcgccagaatatgttctcccaggctccattgcatggcggcggccagattaaggccgtccgcatccaggacggtgggagtgccggtttccagaatgaggcggatggcttccgcgtcttcctccgatacggagccgatgccggggccaatgagaaaggcgctgaacgtccggatggagacgtccgcataactgtccacgggtttgaccatgatttccggcggcatggacggcgctatgaggggatagacgttccggtggacgtggagcgtcaccagtccggctccggcccggagggcggcttcacagcagagcctggcagcgcccagcattccttccgatccggcaatgacgccgatgtgcccgcgtttgttcttatagtccgtatagggtcttgcagagaggaatttagtgagccgggaggaggtgatgagttccgtggcgggaagcgcctgcacatagaggccgggaaggtcgatgcaggccaggcgccccgcatgcagggtggcgtcgtcatccagcagcccctgcttgaccgctcctatgcacatcgtgaaatccgcctctacggcattttcctggggcatccccgtatccgggtcaactccggtgggaaggtcgatcgccaccgtgcgcacagctccgcagcggtcccgcaggtagttcatttccgcgcagagggcggagatttccttgcggagcagcccttttgctccaatgcccagcaggccgtccagcagaatcatgggcttgcccgtacggggcagcggcgcttcctggtattcctggggcggaggagatatttcagcgagctgccgcacgggcagttccccccattccgcgcgcgggtaggcggcgcggaaacctgtttcccagccatgctgtttcaggatattgaggacggtgagggcgtctccgccgttgttgcctttccccacgtaggctatgcataacccggggacgggaaagaactgcatgacggcttccgcaatgccggcggaagccagcttcatgagggttctggccggagttccgttgatgatgagctcgcgttccgcgatctgcatattttccgtggagcaaactttcatggcgcgctgatgggatcagtgtgcactgtacgttaaaaaaccttctcctgcaagccggagaaggtttttcgcaaaaggagtgaatccgggggcggttaaccgatgcggaacgtgatgcgcgccttggtcatgtcgtagggggacatttccatgcgcaccttgtcgcccacaacgattttgatgaagcgcttgcgcatcttgccggaaatgtgggccagcacttcgtgcccgttgggcaggcgcaccttgaacatggtgcccgccagcacagcgcagatggtgccttccacttcaatttcgctttcggagttttcttccttgggggccgatttgctgaaatgcctcctgcccttggtgtggcggcccccgcctccctgcgggcgcggccggttgggcccgcctccggggcgtggtcctccgcctgttctggcgcctcccgggccagcggactgtccggccgggcgtgccgggccggtgccactcccggcgggccggggctgtccgggacggctggcgttgccggccggtcttgtgctgctgcctgccggcctggggccggggcgggaattctgaccgccgctggggcggttgctgggtcttggattcgggctgataggattctccttgtaaggttaaaatgaacgcgcgtgtacgaattttcgcgcaggcgaataataggccatatttccacgagggcaagtcctgaatgtggaaacgccgcaattaagccgcgattctgcggaagggacggaaaaaaggccgcaaaaggggagtaaaagagaaaaagtatttgacatttacgcgaataatcattaggaatgcgcccccgaattggaagattacggcaggatgccgaaaaacgagaacgaagaattgaaccatgaagaccttctcagccaaaccgcaagaagtagagcgcaaatggtatgttatagacgctgccgacaaggtgctcggccgtgttgccgttgaagcggctaacattttgcgtggcaagaacaagacaattttcaccccccacgttgattgtggcgactttgtcattatcgtgaacgcggacaaggtggtgctgaccggcaacaaggaaaacgccaagatttacacccgtttctccggatacgtcggcggcaagcaggtggacactccgcggaaaatccgcgcccgccgccccgaacttcttctggaactggccgtcaagggcatggtgccccacacccgcctgggccgtcagcaaatgaccaagctgaaggtttatgccggcgccggtcatcctcatgaagcccagcagcccactgccatcactctctaattgatttccccagacatgagtcagacaaccccatacaacgccaccggccgccgcaagaccgccattgcacacgcttggcttactgaaggtgccggccgcatcacgatcaatcgtcgcggttttgaagaataccttcccaccgtccagttgcagaacgccgttctccagcccttccaggttaccaacaccatgaacaaattcgacgtgaacgtcgtcaccaagggcggcggcattcacggccaggtgggcgccatccgcatggcgattgcccgcgctctggttcaggttgatgaagcttcccgcgcccagctgcgtgaattcggtcttctgacccgtgattcccgcatgaaggaacgtaaaaagcccggtcgtcccggcgcccgcaagcgttaccagttctccaagcgctaagcttggctggctgcgaaggaactggctttaccatttctttctcggaaaaggagtgctccctgcggagtactcctttttcgttgcaggggaagctggttgctgttacgattaattattatggaagaaggtcggcagcaggacggaattccggattcttctccggaagaagaaaaaacggaaagaagcgttttccctattgctcctttactgcttgctccgctttttctggtgatagcctcttttctgaaacattcccatcgcatggcgggcaatgtctccggcctcaggaaggtggaatacggtcccgctttccctttgtttcaatttgcaggcgtggccttgtatttctatctggcttacgtggcctttaagaaaggctttcccggctggggctgggtgtttggttcccttgcggtggcgttcaatccttttccggcgtttgccacgggaattgcgggcgactccatggcatggggtgtggccgtgctcgcggccgtttccgtgacggtgaaagccttgatggactcaccgcggcagcaaggaaagctttagccgtttaccggtggtacggcgttcccgccagaatggtatggcagcggtaaagctgttccagcaggacgacgagcgccagctcatgctggagggtgaatttgctcagggccaggatatggccgcaccgggaacgcagttcttccgtgtggccgtccgaggccccgatgaggaacgcgatgcggcgcacggaacgcatctgccagtcccgcgccagtttgaccagcttctccgtggtccagagttctccgcgttcgtccatggcgatgcgcaggcagccctcgctggcggccagcaggcgttctgaaacgtctttggagcttccgtctttgacgagtttgagttccgtcttgccgaaaggcttgaggcggttgaggtagagttccacgccttcccgggcatagcccagggccggcttgcctgcggccagaatcaggaattgcatgagaagtcaggagttggaggatgaattgaggtagttcagcaggttgcgggcccaggtttccgaaatgccgcggatggcggcgatggaagccgggtccgcccttttgatggcggccacggacttgaatttttccagcagcatgcttttttttgccgcgctcatgcccggggcgtcgtccagggcgctttcccgcatgcgcttccggtaaagcagttcgttatagccgttggcgaagcggtgggcttcgtcgcggatgcgctgcatgagcttgagggctcccgtgctgtgcggcaggcagaggggctgtggctggtgggggaagaagatttcctcccgctgcttggcgaggccgacgatgggcatgtcacccagtccgatggcttccagatcggccagggcggaggagagctggcctttgccgccgtccaccaccaccaggtccggaaccttgatgggggcttttccttctccgctgagcttcttgagccactggtacagggtcatgtctgcgggccgtgaggctacggcgtcgctctccgccagaatgcgggagtagcgcctccggatcacttcagacatggaggcgaagtcgttctgcccgtccaccgtgcggatgcggtagcggcggtaggccttgttgtccggtttgccgttggtgaagcgcaccatggaggccacgatgtggttggaggagacgttggaaatatcaaaacattccatgatggctggaggctcttccaggcccagggccagccccagttccttcatgtcttcttccgggcgcacggtgccgggcaggttgggcgttcccttctggaaccgccgcgcgggctccagaaccttgaccaggttgtcccggatgtcccgcaggtacgctgcgcgctcgaagtccagctcgtcggaggcctgcatcatttcccgggtgagctcgtccagagtgctttttttgccggtcccctccagcaggcgcgccgcctggtcgaagttccggttatagtcgctcacggaaatgcgcccgatgcacggggcggagcagttgcgtatcacgtccgcatggcagtgcttgaactcgtggagacccggatttttggccttgcaggtccgcagccggaaatgccggttcagccattcctgcgtggcgtaaagcgcctgggagtggacaaaggggccgaagtagcgcgctccgtcgtccttgcgcacccgcgccagctggaagcgcggcagtttttcccccttgggaatcttcagcaggggatagcgcttgtcatccttcatctggatgttgtaatgcgggcggtactgcttgatgagcttgctttccagcagaaaagcctcctggtcgttcctggtttcaaagtagtcgaatgacgcaatggcattgatgagcgcccttgtcttgtggttggacagggtggcccccgtgggggaaaagtagttgcccaggcggcggtggaggtccttggccttgcccacgtaaatggtattccccagggcgtctttcatgatgtaaacgccgggtttatgcggagtttgcctccagagttccttcagagatggtttctcacgatctgccacggggattattatgccatatgcggcaagaaatgaaactgcggaaacgtactgcattacggctacttggcttgcctaggaagacttcttctgtataatcccctacgtcttttgtatgaatcctgtaccgtttaccacgctggctgccgccatggactttgtggtgggagatagaaattatcccctctccgagctgtttatgaaaggcggcttcatcatgtggccgctgctcctgttatccatcgccggggtggtggtgctggtcatgtgctgtttttccacccgcgcctccgccgttctgcccaccaagctggtggagcaggcggaatccttcatccgcaagagggattatacgggcctttccatcctttgcaaggatggggactcctgctacgcgcgcgtaatgctgacggtggccagtttcatgctgcgcaatccttccgcccagtttgaggaggtgagggaaatagccgccgcggaaggcggccgccaggcgggcttcctgagccgccagatttcctggctgtcggacatcggcgccctggctcccatgctgggcctgctgggaaccgtagtcgggatgatgaagaccttttttgagatcgccaacggtgatttctccggcggcaagcagcgcatcgacatggcgggcggcgtggcggaagccctgattacgaccgcgggcggcctgatgctggggatccccgccatcctggcctatgtgtacttccgcagccgcgttcacaagcgcgtgggggacctggaagccgccgtgacgcacagcgtttccgtagtagccacccagctccagaagccgcgtgccggcgtagccggagccttccatgaggaagaacttcccagggttcccgttgaccccacctccctgcgcgacgtgcgcgggctttagccggaagcggccatccccaccacaccggaagaacgtatgaaatcccactataaaatgcccagccccatcgggttccagctcgcgcccatgctggacatcgtgtttctgctgctggtgtttttcatcgtgacccagacgtttgaggatgacgagccggacctttccatcaacctcccctccgcggagactcccaagcccggtgaaaacgtttccaatgaaatcatcgtgaatatccggaaggacggcaccgtggtgatcaaccgccaggcgtataccatgccgcagctggaggacaagcttctttccgtcgcccggctggataaaaccatgctcgtccgcatccgcgtggatgagaaggcggaatccggcgtggtggtgcatgtgatggacgcctgcctgaaggccgggctgaacaatgtttccttctccacgcggcctccggctccctcttccgtcaatgttcccaacccccaggcttcatgaaagcgttacttttcatcaatgcaggtttaatgactttggcggcgttcgccgccgcgcaggaaaacattccggacgccgctcccattgcggacggtccgctggtcgccaatccggagcaggattccctggacatggcggacatgctgtacaagcaggcccaggaaccggcgacgaaggcaaaccggcaggaatatggccgcctgcttgatttgagcctgcgcaagtatcttgaatttgcccagcgtttcccccagtccgcccaggctcccctggcggagtaccgcgccgccatgtgcctggaggagctcggcaggaaggaggacgcgcacaccctgttccgcaggctgacccagacgggcggcccggctctggttgccgcttccgcctaccgcctggcgacggacgcctccgctgccggggaaacggacaaggctatccagtattaccagctcgtggtccgcaatgcggaacagaatgatttgaaagtggacgcccagtaccgcctgggacgtctgtttcttgccagcgggaatccggacgccgccgccaccatgttctgcgcggtgataggcaatccggaagcggatgcgaaatttgttttggtgtcccggatggggtatgccgccctgtgtgcggatacgggccgtctgggtgaagcctattccgaataccgcaaggtgctggaaacgccaggcgtggatgacaggaaccggggcatcgccacccttcaggccgccatgctggcaaccaggctgaaaaagaccgcggaggcccagaacctctatgaacggcttttgaaggacgaatccctgaaggaaatggcgccggaagcccgcatggggctgctgctggggctgtacaacatgggcaagtacaaggagatcctttcccagcacgagcagcagaaggacatgaagatgccgaccaaggacggccaggtgcgcctgctgatgcttctgggccagtctgcctacaagctgaaggagtaccagaaggcggcggatttcttcctggaggcggagaaggccgttccctatacgcaggaagccatgcaggcctccttttaccgtctgctgtgctataatgaactcaagcagaaggaccttccccagcgggcacagagcttcctgaaccattacgccaaggcctttccgaccagcgaactgcacgacatggtgcgcctgatggccgcggagaacctgttcaacaccaatccggcggatgccgcccggttttacgccagcattgattttgacaaggtgccccccaggatgcgcgcggatatcctgtacaagagcgcgtgggcgatcgcccaggccgggaaccggggcgtggccgccaaactgctgacggatttcatcaacgatttcccgcgggacccgcgcatttgcgaggcgctgaccctgcgcggggacatgtacgccaagaccaagaaggaagcggaggccctgatggattttgaccgggtgatcgctcgctggccgaaggcggaatccgccgccgccgcgtggcagcgggccgcccagatttatgcgggccgccaggatatggtgaacatggccaagtattatgaaggcctgattcagaatttcccgaaggcgtcccccgccgctctggcggaagctcatttcctgctggggcgtgcggcgtttgatcagggagacttcaaatcctccatcagccacatggcggaagccaagacgctggacccccagaagtacggggaacaggtcaatgtgctttccgttctgtcctatcacaagctccaggacgtgaataaattgaaggaggccctggaaaccctgcaaaaggaaaacccctccgccgtggcccgcgtgccggacgtcatccccgcatggctgggccttcaggcctatggcatgaaggacctggaaacggcggacaagtacatgacctgggctacgcagaacgaccagcttcaaaatgtgaagaaagtgatctggcgcaacctggcgaaggtgcgcctggcgctcaagaagtatgaccgcgccctggtggcttccaacaacttcctgaaggatgaggaccagccctaccgccgtgcggacggcatgctggacaaggcctccatcctgctggggctgggcaagtactcggacgcccggaagacggcggaggaagcgctggccctgggagtggaaggccccctgatggcctccctgaaaattgttctgggggacatttcctatgcggagaaaaagtttgatgaagcagccaagcattacggcgtcacggccgagttgttcgtcaatgacgccgaattgaaacccaaggccctgttcaaggcggcggaagcgctggacaaggctggccgcaagtcggaggcttcccagtaccgggcgcgcctgcagaaggagttcccggattggaagcaggatgacgaatcactgcccccggatgcccgctaggcgtccccaaggatcggaaccggaatggagaacaggcgtaaaagatggtatgatctgttcggattgctgccgcgcaatctgggccgtctgctgctgtggctgggcctcattcctattgccttcatcatcgtcctgctcgtttacgcctggagggcggaccagtatgaactggacgaggtgctggccccactggaaaattgcgccgcgtatgaccgcaacggccagtggataggcaccctgacggaccacgaccgggtgtatgtggcccgcaatgaactgcctgacaacctggtgaatgccttcattgcccgggaggacgaagcctttttcgatcacggaggaatcgtgtattcctccatcatccgctccatttgccggaacctgaccacgctgtcctatgcgcagggggcttccaccatcacgatgcagctggcgcggaattgctatgaactgggggggaagaccctggaccgcaaggttctggaaatggccgtggcgcgccgcatagaaggcaaatactccaaggatgaaattctgacggcctacctgaaccgcatttacttcggacagcagtgctacggcattgcgcaggcggcggatttgtacttcggcaaaaaagtagcggacctgacgctggcggaatgcgccacgctggccgggctggtgcgcggaccttccatttacaacccggtttacagtccggaggcggccgtcaaggtgcgcaacgcgacgctggaaaggatgtttgagtgcgaattcatcacccaggaacaactatggcaggcgtcccgcgaaccgatgacggtggcgggagaacgggaagcgcgtcccggctcctatcccatcctggtcatttcccgtgagctgagtgacctggactgctgcgacgagcaggagggaacttccagcatttttgtaatgactacgctggatttggaattccagcggatggtggaggaaataagcgagcctgcgctgaccgcgctggaagcttcccccgtgtgggccggactgcccaggagagtggacaaccagttgaagaattgcgtgcaggcagccgtgctgtgcgtggattcccgcaaaggggacctgctggccgtgacgggggggcgctctgcgctggacggcgtggaccggtggcagacgatggtgatgcccggcgacctgtttacccccgtcgtcaacctgtgcgccgtggaccagcgcaggactgttattcgcagcagtcctgaagtgaccgggcgcggggtagggttcaatacggtgatagaaacggcgcagaaggccgggtacaagggggaccttccccgttccccggatttgtatgccggcaggttccgcgcgcctctctcgcatgccgtcaatgcgctgtacctcatcggcaacgacgggcgcaacgtgcagatttcctccgtcaggcaggtgggcaccaccaagaaaaacctggtgatggtgaacgctccctctccggaagaaagccgccgggaaatcctgccgcgtgaatccgcccacctggtagcggcccttcctcccttccgttacgacgaacgctccaggaagacgtccgtcaatgtcaggctgccggaaaacacggggcatttctccgccgtcatggggcgttatttcacggtctttgtctgggtgggcttcgacgagccggatgaagccgtctataaaaagaagggcgttgcctccgcactggcgaagacctccgccgcgctggccggggaagtgtatgaccgggcggaggaaaaccgccgcaaagccgtccgggagcgccgggagaaggaagctcctgcggagcaggacacctgatggcatccaattttccattaatagaatatcatgaaccactcacctgaaatgaccgcggccatcctggccgccaaatccgccggagccttcctgaaaaagcatttttacgaccagaagaaggtggatgaagccagccagaacgacatcaagctggagctggacaagctctcccagaaactgattacggaggaaatcctctccgtgttccccacccacgccgttttgggcgaggaagggtataccggagaccgcaacagtgaatatgaatggattgtggaccctattgacgggacggtgaattacttttacaccattccctggttctgcgtctccatcgccctgcgccgccgcggggaaatagtgctgggcgtgatttacgatcccatgatggacgaatgctggcatgtggaaaagggaggcattccgtacatgaatgaccatcccatgcattgcagccgccgggaaaagatggcggaggccgtggtgttcgtgggacacggcaagacggacggttccaaggaaaagggaatcgaacgcttcgcaaaaatcgcctggcaggtacgcaaggtgcgcaacaacggttccgcggccctggctctggcgtatattgcctgcggcaggtttgacgcctatgtggaaagcgtcatttccatctgggacatcgccgccggggttctgctggtggaagctgcgggagggaaggttgtcctggaaccaaaggaggacaatccggaacaattcgccatcgtcgcctggaacggccgcattccgatcatggaagcgctggacgaataacttgaacgacattgccgcagtattgtatgaaagacatgattgcactgaccgggctgggatatgacatccaccgttttgcggaagctccgcgtcccctgatgctgggcggcgtgcacattccttccgcccgcgggctggacggccattccgatgcggacgttttgtgccacgccattgcagacgcgctgctgggtgcggccggattgccggacatcggctactggttcccgccgggagaccctggctgcaaggatatttcttccctggacatcgtggcgaaggccgtttccctgattcgtgagcgcggcggccgcgtggtgaacgtggattcctccctgattgcggaagctccgcgcatctctccctacctggaacagatgaagggcgccctgggaaccgccctgggcatctctccggcgcgcgtgggggtgaaggccaccaccaatgaacagctcggcgcgctgggccgccgggaaggcatcgccgcctttgccgtggcggctattctgatgccggaagatttgactgcgccgtaagaagacgtccgccatatttccttttttgggctcttttttcagaaggggtgcgggggcggctgtgccgcaggctggggttcaggctttagagcggcagacggatttggaatccggagtcaagcctacaaaactgaaagaaaaacgttttcaggggattgaacttgccaatatcctgggaattgccatagggagttcgtgatgtgacgggctttcttttcgttccggcaatcattaataaccgtctttacacttcggcggcggtagccatcagagccgggtgccctgtctcccggacggtatgcggctgtgaaagggaacggtggaatattgatggagggcggttttgcggttgcggcgcctgggaacggaaggctccctcctttcgttgttgaaactctttctgtagcgcagcggaagcttcttatccaatagcccccgggcctctccacaggcggtccatcaggaccgggatgccctgtctcccggggcgatatgcggctgtgaaaaggagatgggagaaatattggcggagcgtcaatttggaccgttttggagcatagcgaagggcagtatttccggctatggaatccataccggattccaaattcgctaagttgattctggtgggtgtttggcattttctgccgggccgctccaattagctacacaaagaatatatgacgaggaaaaccgggcttctccgaatggaggagtccggtttttttgagggggctgccgtatggaaatttcccttttcttccagcgcttgtcatgggagggattttctttccatcatccgccccaataaaaaagtgcggccgtgtgaacagccgcacttgcagggaagagagagtaaaggcgcgcccctacttcttgggcgttatgttgcgcatgttgcggcccttggccttgcgctgctgttcctccagggccacgcgctgctggtccatcatcctctggaagaagccgggcttcttctttttggcggcggagagcacgggcatgggcaggcggcggatgagggccgtctggccgatggaaatcaggttctgcgtggtccagtacagggccagggcggaagcgaagttataacagaacaggaagaacatcaggggcatcaggttcatgatgatgcgctgggagcgttcgcccgcctgcggggtcatccgcatctggacaatcatggtcacggccatgatgaggggcaggatgttgatcgggatgccgaacaggtggcctacggtgtcgggcagggacaggtccgtcatccacaggcagaagggctggcccctcagctccgcggaatactggagcacgcggtagaaggcgaagaagatggggatctggatgagcatgggcacgcagccgctggcagggttgatgccgtatttctggtacagcttcatcatctccatgttcaccttctgggggtcgtccggatatttttccttaagcttggccatctccggctgaaccagggacatgcgcttcatggccatgtaggatttcttgtgcagcggccagatgagcgcgcggacgacgatggtcatgcagatgatggccacgccccagtttccgaaccatccgtggaagaggttgagcagccagttcatcggcacgctcaggaagacgagccagccgtacgccatgatgtcgctgatggcggggtaggtgaggttcaggtcgcgcaggtaggcgttgaatttgggaccggtgtagatgtcgtaggtgagcgtctttatttcgttgggcgccatggtcaggttggggatgcccatggctacggtgacgccgggcaccagcgtgttgttttcatgcgccagcgggaattcctggcgggtggcgtacacggtggagcccttggattcgttctggggaagaagaatggtggcgtagtactggctcatcacgccggcataggtcaggtcctgcaaggggccttccaggacgcgtgcctttgcggtgctgaaaaagccgcccgtgaagtaggagggcacttcctgttccagggaaccgtccgcatggtagaagaagtgggtgtaggtgtccttcggttcactcttggcgatggggtaggcgctgccgccgaagatgcccatgtagcgcagatcctggacgttgggggatttgttgagcagggagacggtcagacggatgaggtacttgctgccgggcagtacttttccttccagattcttgacggggtgcagggtgtaggtcttggagatgaagagctgccgtgcgggatcatagccctccagggtgacggagtccgccgtgcggctgacttccttgtacacggtgttgtcataggacgggtcctgggtggcgtccatgttgaagacgagctcgccaatgcccctctgctgggcttcgttgatggtgatgttgtggtccgcgactttttgggagtccacaatgtcgttgtggagggtaacggcgccgatggagccgccgatgcggttgaaggtgtacgtgatgaagggttcctgcttgccgtccgcttcctgcgtggccgtcagcgtgatcgggctggtcttgtcttcttcaagggccttgttgacggaaggctgttccggggcgctgggagcggcgggcgcctgtgctccgggagccgggacgcttgccggagcggcggccgtctgctggacgggagcgggggcggcggggacgggctcttcctttttattgttgcccatgtaaatgttcaggcccagaagggcggcgcaaacgcctatgacgatccatgctgtgcgatccataatgtgatatagcttgattgaagttggttgggagggaggggagagaaaggtaatttaatgcggcgtgcgggccggaggcacgggatcataccctgaaccgccccacgggttgcatcttaaaatgcgccatgagccaagaagaaagccgcgccaggctccatggacccggacggcctggatgaagtactgggaacaggagggagtatagcggcagccgctgccggggccccccagcgcatgcaggggggcgctgatgaaggtttggtagccccgtaccagggcaatgagcagccatttcatcatgctttgtcttgttcccgggaaagaagttgaagtttgagcttgcgggcggctttctgccagtcccgctccaggtctgcatagctggcttccacggcccgccagcggaggacgcacaccaggtgcacgccgtgttcaaagggggctccgtgcgccctcaggatttcccgtacgcgtctccgcagcttgttgcggacgacggcgcagccgatttttttcgtgcagatgatgccgaatttggagggttcctccggatgttccagcggggctgcacttaaaacaataagccgacctgctacggatggtccctcgttgcgcacccgggcaaattggaatgccctggtcatgctttgttgacgagtaagacgcatctcccgcgggtcggcccgtgaaaaagttccaaggaggcgttaaccaagtcctggcggctgaattaacggccgtgctggatggtatggcgcttgtactggatttcggctcccttgggaagcaggcgcttgcggcctttggcgcggcggcggcgaatgatgtctgctccgttcttggtagccatgcgtgcacggaatccgaactgacgcttgcggcaacgcttggatggttgataagtcctcttgctcatgatgttgaaagatgcttcttgtgaattactagattcagtgccgtccgtctaagcggcctatgcacaaccggacggaaaggataactattttggctgttttgtcaatccgtcaggcgattaatttgccctttttcttggggaaggtactggaataagtgatgtttatggttgatagccagttattttctgttccggagggagccctttgttttacagaaagagcagttccgcataggtgggaacgggccacaggtctgcgtccgtcaggctttccagcatgtcgatggtgcttctcagattgtccatgcccgtctggatgaccttcgtctcggctttgtccacggcgcggcggagttcctgcacctgggtggggagaaggtccagcagcgtgccgatctggttggcgcggtccgcggtggctttcatgcccgccttgattccggcggctttcatctgggctatggcggtggtgagctgcgtgagctgttccgtcacggcggggatgtagagggtttccaccatcagaagggcggtttccgcttcaatgctgatttccttgtggaatatttccgtctggatttcatggcgggcgtggagctccacggggctgaccaccttgtatttttcaaagagggtcttggccttgggcgtttccagcgcggccagggcttcaatggtgccgggaacgttgggcagtttgcggcgttccgcttcttcaatccaggcttccccgtagccgtctccgctgaaaaggatgcgcttgtgcttcttgatgatgttctgaagcagcttgttcagcgtggcatggaattcctccggcttgtccttgacgggttccaggatggtgcagatttcatccaggctttccgccacgatggtgttgagcaccgtcatgggccaggcgcaggtctgggaggagcctacggcgcggaattcgaatttattgcccgtgaaggcgaaggggctggtgcggttcctgtcggaggcgtccagggggaacatcggcagggtatccacgccgatgttgatggttttctgggtgcacgcctttttggtgccgcccttttcaatctgctcaatgatttcatccagcagatcccccagaaagatggagatgatggccggaggcgcttcatgggcacccaggcggtgttcgtttccggatttggcgacggaggcgcgcagcaggtccgcgtgttcgtccacggccttgatcgtggcgcagagcagggtgaggaagatggcgttttcctgcgggctggaacccgggttgagcaggctgccgtaaccgggcgcggagagggaccagttgttgtgcttgccggagccgttcatgccggagaagggcttttcatgcagcaggcagaccatgtcatgcttgttggcggtcttgcggagcacttccatgaccagcatgttgtggtccacggccaggttctggctttcaaagatgggcgcaatttcaaactggccgggcgcaacttcattgtggcgcgttttggccggaatgccaagtttccagagggcttcgtccacgtccaccatgaattccagcacgcggtccttgatggagccgaagtagtggtcttccatctgctggtgcttgggggggacgttgccgaagagggtgcggccgcacatcatcaggtccgggcgcagggcgtaaagctgcttgtccaccaggaagtattcctgctccgcgcccagatcggcgctgacgtggatgttggacgggccgccgaagcaggacagcaggcgcctggcctggcgggtgacggcggtcatggagcggagaaggggagtctttttgtccagcgcctgtcccttataggagcagaaggcggtggggatgcagagggttgcgccgttttccgtccgcttgatgaaggcggggctggtgggatcccaggcagtgtagccgcgggcttcaaaggtggcgcggaggccgccggaggggaagctggaggcgtccggctcgccctgaaccaggctctttcctgagaatttgagttccaggtttccttccgggtccacgtccacgaaggagtcatgcttttccgccgtgcttccgttgaggggctggaaccagtgggtgtaatggctggcgcccttttccagagcccacgtcatcatggcctgggccacttcattggcaatgtccgggtccagcttttcgtccttgcggatggtagccagcagtttcttgtagacgggacggggcaggtagttgcgcatggtctccatgttgaagacatcctgaccgtaaatttccgcaatgaaggttgcggcgttgccaacatcggaaggtgggtttgtatgcatcttggtagggaacgcgccaaaaggctcggaatctaccaaaccttaaaaggggggtttttgcaagccgaatcctgccggagagctccacggagggatgattcagggaacaaaagttccgggggagtccaatttcaccttttgaaggggaggacggaaaggctgccgttcttcatgctcccctgtccggaagcggtacggaacggcctgggaggtcattccccgcgcatggggtttcctgccagccgtccgttcatccggaggcggaagggagggggaatgcctgctattccagcggtcccaccgtgattttctggcacagggtgtgggattgtccggaggcgaggggaatgcaacgggaatcggcattgcccatttccacgcacaggaatttgttccaggattccgcgcccagatccgccatgtttccggctccctgctgtcccgggttccagatgatgacggaagaggcgtggtcccgctccacggtgatggcgcggttcagcacgaagtcttccagcacgattttcccggaacaggccgggcagtcgtaaacgcggtccaggcaccccaggggggccagcgggcgttctccgtgcttcatgggctgggccgcttcttcccggaacggtacgtcgtccagcccgtgtacgcggcatttggtcaggttgccgacggcaaagtagttgtgaaaggcttccgtgagcttgcagggctgcatgcgggcggtggtttccagcttcatggccagcgtgcggcccagcgccaggcgcaggatggcggcggggtaggattcgtcttccggatagaaggccagggaaagcagggcgttcccccgcttgtccgtctcctggtgatggaggcgccattccgaggtgcgcgccacgccgtgggacggttcgcccttccgcggaccgaaccagggccagcagacgggaatgccgccgcggatggctttgccgggcgcaaagaccgcattgggggaaaggaagaggcattcttcctgcccctccggcttccatgacgtgaggtgcgccccttgcaggcacagggtggctgtacagagcggtgtttccacgtccaggaaagtgactccctggtctgttgctcgccgggtaatcatggctggaggcgttcgatcgtccaggaaccgttttcctggagcttgtacatgaaacggtcgtgaacgcggccgggaccgccctgccagaattcaaaggtgtccggaatgatccggtagccgccccagaaggagggcagggggatttctcccttggagaatttgtttttcagctccatcagcttcatttccagcagttttcttccggagatgacggagctttgctgagagacccacgcgccaagctgggattccttgggacgggtgaggaagtatttcagggattccgcgcgggaaaccttgacggccttcccgtaaatgatgacctggcgttccagcatcacccatggcagcatcatgcagacctgcgggttttcttcaatgtcatgggccttgtggctgccgtagttggtgaaaaagacgaagcctgtctggtcaaagtatttgagcagcaccgtacgcagggagggcctgccgtgggcgttcaccgtagccagggaaaaggcgttgggttccggaatgtccgctttcagggcctgttcaaaccaggtctggaattgttcaaaggggttttccgccaggtcttttctgtgaagctggcccttgaggtattcttctctgaaattggacaggtccatgatagggtgaaaggtaagtgttattccacgctgaaatccagccccaggtccagggagggggcggagtgggtgacgtagcccacggaaacgaagtccacgccggattccgcaatggcggccaccgtgtccaggttgacgcccccgctggcttctatcaggggtgtggcgcggtcgccgcgcatggcgacggcctgcttcagcatctccggcgtcatgttgtccagaagaatgtggtccactccttccagcttgaggaaggcttccacctgttccagagtgtccgcttccagctggatttccacgccgggcttttccgcgcgcagcctgttgatgcactgctggaggtgttccgtgttgccgtccgtcatcaggtggttgtccttcaccatggcgcggtcataaaggcccatgcggtggttggtgcctccgccgtgggccacggctgccttttccagcaggcggtagccgggagtggtcttgcgggtgtccaggatgcgggcgctggtgtgggaaacggccttcacgtatttcctggtgagcgtggctacgccggaaaggcgctggatgaagttgagcgcagtgcgttccgctcccaggatggagcgggcggagccttcaatgagcatcaccacggcgccgggcgccacggcctccccgtcatgcaggtagacttccaccttcagggaggggtccaccttgcggaagacttccgccgccacgttgacgccggaaagaacgccctttttccggggcgtcagaatggctctggcggtcaggtgttccgggacgaagtatgtggaagtcacatccccggggccgaagtcttcggccagcgccagattgatcagggtttccacgttgtcggatacggtttctgcgggcatgaaagaaaatgcggcttaatattcgcggttgaggagatagttggccagttccaccaggcgggtgcggcgttcttccgggaagatcatcagggcgtccagggccgcctgggtgcggcatttcgcttcggaacgggctccgtccatgcctatcagggccgggcaggtggatttctgggcgttcacgtccttgccggcggtcttgccgagcttttccgtggaggcggtcaggtccagaatgtcatcaattacctggaaggcgaggccaaggttgtagccgaagtccgtgacggcttccaactgggcttccgtggcgttcgcggacatggcgccgaagcggagggccgtggtcagcagggccgccgtcttcccttcgtacacggcgcgcacttccggttcggagagctgcttgtgctccccttccaggtccagaatctggccgccgatgagcatcgtgctgccgccggtagccgccagttcccggacataatcccggacagtgtagcgttccgtgtcgtccacctgggcgatcacggcaaaggcttccgtcagcagggcgtctcccgccagaatggctaccccttccccgaaggccttgtggctggtgggcttgccgcggcgcaggtcgtcattgtccatggccggcaggtcgtcatgaataagggaatacgtgtgcatcatttccacggcgcaggcgggcaccagggcattcaccgccagaccgccgcaggcttccgcggccgccaggcagagcacggggcgcattctcttgccgcccgcgaacatgctgtagcgcatggccttgtggatggtttcagggctttcgtcctctgcgggcagaagcctgtccagcgcggcgtcaatcaaggcgcactgttctgtaatgtagtcgttcagggattgttcttcacacatgacgttaaggaatgggtgcggggatagtagatatagttcagcggccgaccagaagttccgcaatctgtacggcgttcagggctgcccctttccggacctggtcgcccacgacccagagggtcagggcattgtcgatcgccatgtccatgcgcatgcgccccacgtagcaggtgtccccgttggtgctgtccagcggggtgggccacacgccttccgagggattgtccatcacggcgacgccgggttttccgtcataggcgcggcgagccgtttccacatccacaggctgctcaaactgggcagtcacggaaatggaatgggagcggtacacgggcacgcgcacgcaggtgcacgtcaccttgaggtcgggaagggaaaggattttgcggccttcattgagcattttaagctcttccttcgtgtagccgctttccgtgaaggagtcgatctggggaagaaggttgaaggcgatctggtgcggataaacgtttttcaccacgggatggccgtccaccacggcgcgcacctgggattccagttccgcaatgccgtgctgcccgcttccggaaaccgcctggtagctggaggcgatgacggttttcagcccgaagcgctggtgcagggggaagagggccatcagcgtaatgatggtggtgcagttcgggttggcgatgatgttgcgggggtggttgagggccgcttccgggttgatttccggcaccacaaggggcacgtccgggtcctggcggaaggcggaggaattgtcgatgaccacgcagcccgcggccgcggcaatgggggcgaacttcagggaaatgccgccgcctgcgctgaacagggcgatgtccacgccgtcaaaggatttttccgtcaattcttccacagtcagcatttctccccggaaggcgacctgttttccggcggaccgggcggaggccagaagcttcagggagcctacgggaaagttgcgtgtttccaggcaggacaggatctcaacgcccaccgctccggtggcgccgacgatggcaacatggggtgcttggttcatggttgtgtcagaaaatggcggaattcggtccgcatgggtatgatgataaaggttttttcccggaaaggcaatacgggatcggcagcagatgaacagcgcaggtcaatatgcaaggtataaacaatattaactattcactgttaactattacatgcctatttaacccatttgcccacgccttccggcagcctgccgtcggagacagggccgtagcgggtggattccgtgttgccccagaggggaacgcccacgatgcgcttccaccagccggacatgctggcccccgtgtagcagccgaagctccagcagtcggaccgcggggtgaaaatgtcccggcggatgcggttcaggtctgtttcgtgaatccattccgtggagacggccatgatgttgttgccgtagtccagcatccacgcaaaacagttggaatggccgaagtagtagaaggattccacgaagtctccgcggaagcgcggggaggaattcagcgcccggatggcctggtccgcgctgtccacccagacgagcttgatcttgtacttggaagccaggtcggcaatccagcgggtatagggcttgccgtcctccctgccccgtgtcgcatagcccggacggtaaacgatccaggtgattctggcggaggggtccttctgctggatctgggcgatgcggatggtggaggcccttacaaagttggcccaccagttgtcatgcctgtcaggctgtattctcagtccttcccattgtctgagggcgggaccgccgcacatgacgacgtggacggcatgggacagtcccgtgccgcccgccagcagggccagagcgagaaaaaggcgtgaaaacatgcccgcaccctacctttgctccccgtgtctgtcaacccgccggagtgttttttaccggaacagacgcacatggaatcccatgggatgatttccgtttccctttagcaattcaccacgttcacggccaggccgccctgggcggtttccttgtatttggactgcatgtcccttccggtatccagcatggtgcggatgactttgtccagagggacgaagtgggcgcccgtgccgcccagggcaatgcgggcggcgttgatggccttgatggcggcgatggcgttgcgttcaatgcagggtatctggacgagcccagcgatcgggtcgcaggtgaggcccagattgtgttccatgcctatttccgcggcgttttccacctggtggggcgttcctcccaggtactccgcaagcgcggccgcggccatggagcaggccacgcccacctccccctggcagccgacgtccgcgccggagatggaggcgtttttcttgtacaggatggcgatgccacccgcggtgagcaggaagcgatgcacggcgtccggatacggtgaaacgcagaatttggtggcgtagttgagaaccgccggaacaatccccgccgctccgttggtgggggcggtgacgatgcggccgccggccgcgttttcctcactcacggcaatggcgtacaggttgatccagtccatgatggagagagggtctttcagggccgattctccatgcaccagaagggatttgcggagcgtcttggcgcggcggggcacttgcaggacgcccggcaggttgccgcgcgcgctcatgccgctggaaatggactgcttcatggtggcccagatcaggttcaacttttcacggacttcccgttccggaagcagggcgcattcattggccatgacgatggaggagagggggcattcccgttcatccgccatgcgcagcagttcttccgcggattcataggggagggggaacggctcccggtccggttcctccggatgcagaagctcctgctcggaagcgacgaagccgccccccgtggaataaaacacggcgtcttccaccggttctccctcctggttgactgcggtgaacagcatcccgttcgggtgcaggcgcagaggctggtagtgggaaaggtccaggtcgcgggtgggggagaaacggacggttttttcctccgtgacagggagcgtttcctgctggtgcaggcgggcgatttttccgggaatgctgcgcggctccaccgtgtggggctcttcccccagcaggcccagcatgatggccgtgtccgtgccgtgcccgtggccggtggccgccagggagccgtagcattcacagcggatgcccgtgatttccggcagccggggggaatggcgtatctgttccagaaaacggtgcgccgcccgcatggggcctacggtatgggaggaggatggtcctatcccgatgctgaaaagctcaaaaatgctgtaatggtgcatgtccgttttcctgtagcggggcggggcggaatttcccgcggaaactccgccccgttccggaagatgggcttacagccccagcaggtagcgttccgcttcaatggcggcgccgcagcccatgccggcggaggaaatggcctggcggtagtgagggtccgccacgtctccggcggcgaacaggcccggcgtcttggtcgccatcaggccgggttcccggatgatgtagccggcgtcgtcccggtctaccagatcccccaggaaagacgtattcggcgtgtggccgatcgccatgaagacgcacttgacgggcagttccgttacatccccttccaccaggtccttcagcatgacggcctccagttctcccttgtcgtccgtcttgtagctcacgatggtggaattccacatggggaaaatcttttcattggacagcgtgcgctccgccatgattttggaggcgcggagcgtgtcccggcggtggatcaggtacaccctggaggcgaagcgcgtcaggaacatggcttcttcacaggcgctgtctcctccgcccaccacgcacacgggcacgtcccggtaaaaggctccgtcacaggtagcgcaggcggtgaggccgtggcctaccagcccttcctccccgggtatgcccaggtagcgggcggaagctcccgtagccacgatgatgctgcgggcttcgtaattctggccgctggtcttcacggtgaacagcccggtggcttcatccctgatgacgctcttgacgtcttcatacgcaaaccgggtgccgaacttttccgcctgctgctgcatcaggaacatcaggtccggccccatcacgccgtccggaaagcccgggaaattttccacctccgtggtggtggtcagctggccgccgatctgggagcccgtaatgagaagcggagagagattggcgcgggcggtgtaaatggccgccgtgtagcctgcgcagcctgcgccgatgataatgacttgttcgctcataatatgtgtaagtgatcgccgcaaggttaaaggaacggcgcccgttttgcgagtagattttgcgctatgcggcagcagagcggcggcctatggccctgcggctccggggcggtttccggcagaagaggaaaagagctgtttgcacgtatccctggcgacggtttgcagtattttggccctgtctgcgggaaggctgcacagccgcactcctttcagggacagtttggccgggaggcccagcggagactttccgaacagggtgcagtacatcacgcaggccgccaggtagcttcccgcctccgttgggtgctggccgtccgcctggtacagggcaattccgggatggcgtttgaggcagttttcccaggcaattcccacaggggccacggcggctttttccttccgggcgagattcaaatacgtggcgaggagggctttttgctcctgcgggtccggaacgccggaggcgtcctttcttccccacgtcagcatcaggacgggcgttccctgggcggcgcgtacctgggagcaccatttgccgccgaattccatggtccgctccggggccacgacgggagtggcgctctggtcctggagaatgacgaagtcccaggccgttccttccagcttttcacgggcgcgcccgtcattccagtgggactggaaggaggctgccggagccgcgtgcatgtgcacgtccggccgcagtcctttggtgtcagccatggccttgaccatggcgggcatgcggttgaaaaacgtatagctgtttcccaggaaaagaatatggctcccggaacgtgcaggggcacagcgcggccaggggctttccccttgcggtttttcctgcgcctggagggtgcatggaaaagctgcccaggtgaaaaacagcagcgggaaaattttcatgggcggcatcatggctttagctgaattctaatgtttccggaatgaaacttcaaatggatttcatgaagcacgccacttctctttatgcatcaggtaaaacgtgaattgaatggagatgaaggggaagcgttcaatccttccgtttcggcaaacccttgtacaggtaccgggcttcaggaatcctgccgacggttctgtcaagcagggcggggatatccttgtcgccgtagccggccatgcggaggtattttttgacttccaccgctttggtcgggaagcactgcattaattcgcggacgaatattctttcccttctgggtatgatgttcttaagtttattgtttcttgcctcgttggtcgcgagcctgttggcgaattcgccggctgcttcccggtcgccggtgagctggggggcatggtccagaagcatttccgaacagatccaggtggcctcaaaggcgtgatcgaaactgctccggaattgctggagaaccagtgctctcgctgttagaaaaaaccgcagcgcttcctccttttccggcaaggtggaatgcttgtccgttaaggcggctagcggcatgctccgggacatgaaatctttaactttatagtccaggttagtgtggttcatcagccacatgacgttgctgtgccggttaacgtcgatgaatggcgcggtcgcaatcaggcggcacaggaagaggccgtcggtcaattcctgtggagtgacatttttttttctgtaaaggctggcctccttcagcattttgtcggcttcctggtagaagggaatgatgctgtcctcgtcgagcagtcttttaagttggagcagtttcgtgttctgcttgttaaggttcctggtggctgagggaatgggcaggcggatatcggagaaagcgggagaatggaacaaaaggagggccgtccaagccaggagaataggtacataaacagggttcatggaatgatatggaaaaggattatttatgagttggtatgaagcactttgcctgtcgtactgcgtgtcacggtgcggcggaatttggagacggttactttgacgttttgtaatcctttggttggagaattctcatcggtttcttctccgtcataagtgaaattaaaatcctggggatagggtttgccatgaatcagaaggcagcccttgtcaccggaacggacatgccagccgcatgcccatgaaaagggcttgggaagattggaagcctgcaattggggcaatcgaattccgggtttaaacttccatccgatatagtcactgggaattgccttgtttttggcgttggggcggaacaaaacggcgccgggatcatgttccggtttgaatccttccggatcattcgcccgttcaatgaaggcgatattactgaaactcacttttaatggatgcagggttaaatccaggacggtggatgctcccgcatggtctttttctccatctgctgcacacttgggcattcgtttccccgtatgtactgccatgatttcagatggaataaaaatatgaagaatcagaggttttctctccggcagttcttcgtcgagatttgttttgactcggattgtaagaatcttgttttcagtaatatccttgttgaaggttagaattgcctgattatctccatcctccgatttttcaacggtggccagattatccggttccatggtccattctatggaatccaaatccacctcttttaaccgcttcccggtcacggtcagttcaacttcttctccaatacccacatcagtccgttttttgtcgtcctcctggtttcctccgtcaatcatgcattgggcggacgccacatccgtctttgattcaatatacagggagcagtcgtccatgtctggagtttcttccgcatgaagaaccgtattggcgcctcccggaaatatcaggaacagcagaagaaataaaaggcggagaatcggtgtaaacatggaggatggatgaactatttctgcactcttatcactctatcttcttattttatttattgtcaacggtttatataatatgttagaaaagtggtgaatcgtctggaaggtgaatgggttaagtctggccacgttgttgcatgactggggaagtttttccgggagccttgccgaaggaagacgggtgtggttggatatggggcatgaagcctgaatcgctgaccaagcaccgtgcgacgggagtggatgatcctctattcctggattccctggatatttaccggacaagttttccggtgcacgaacagcggcgcgtccaggattttccgctggcgtttcaagacccgggcttttgttatgaggtatttttaaacggggcaggccgggtggttgccatgctggtgagctggcagcgtgaggcattcgtgtatctggaatatttcgccgtggatgcctccctgcgcggacagggcgccggccaaaggattctggaagaattgagggacgcttttccccacaaggttattctggagattgatcctccggaggacgggatttcacgccgccgcctggggttttaccagcggcacggctttgtgcccaatccccagtttgattacattcatgccccttatacggatgaagggaagcctttccccctcctgctgatgacgcatgaaaccttgctggacgaggaaacgtaccggagctttgttgatttccaccacaatcacgtggtggcgaggtaggcgcatttccgggaaaagggcccgccagaaaaagagctgttgaatccggcgtcttcttcctttccgttttagcgtattggtttttatttcctgatcctgtcacatcgtttccgtgcgttcaaaatgccgggaggattgagtatgatggggaatgatttgccaacggataacaaatccggtgtcaagcgtgtatttttgataagtaaagatttatatttctcttttaatagagcggcggccttccttaaaaacgcttctttaagaaaaagaacaggcggttccttgttctatttcaatttatttcatcatttactgcttgtttttttcaaataccggatttgttatccgtttcagtggacgcatgttcaatccccatggccatttaactttcaagggaacggcagtggcggcagccttatgcctcatttccggcgtacaggcttcttccctgttgtacggactggatttcaaccagcttgggagcaatcagaatttcatcaatctgggaagcggttccactgccatttcaaaaacgaccgggtacatcaattggagtaatagtattacacccatgacggacggcggttattcccactgtcccaacggtggaacgttcaacatcaccagcaccaatggcattgacggcctgaattttgccaccggtttcagcgtgggcatccacatgtattacagttcttccagtgctgactggaaggatgctttttccatgacgatagcgggcacgacgatcagggtggagatgacggccgccaataaatgggtgatttacaacggggggaatatcggaatcccggacggaaccgagttgtttgctgcttctgatgatacatggaactaccttggactgacgttcaagggaaatgagatgcaggtttaccacgatggcgagcttgtcaaaacggtcacgacgagtctttccggtgattccaaggttaccagcatcaaggggagcggggatcacaatcctggggccaacggccttttcgtcgataacctggctgtgtacgacagcgtgttgaacggaaacgattttgcctacctggatacgcacggcatgcccttgtccatcccggaaccggccaccgctacgctggggcttctcgggctgacggcgctcctggtgcgccgcaaacgtgcctgagcttggtttttctgaacattaaaagagccgttcctcatttccgtggaacggctcttttaatttataaacgaagtgggccttggtccgcagggcgcggagaatcagctccatgcccggtcaacggcttcctgttcttccggtccaaggcgcctggaaagccgttccctcatgcgcagccggtattcgggaatgctccaggaatggagcggctgaacggcggagttggtgaattgccaggaggggatgggcaccaccacatccaggacttctccggccctggacggcattccggccagtaccgctgcaatggcggaggaaagctccggacgttcgtccagaacatccagcagccatccgcagcccaggtccgtgggaatggcttccgttccggccagcaggtccgcgaggcgttcggaaggaagttttttggagatggaggccagataaggggcaaaccgcatgtcgcccaggctcatcagggcgtccagcgctggggccatgctcgcttggccgggtagcggattcgcacagatgatgtctgccagcccggcgattccgggaaagcgttcctccggtttgggggaggccagcgtgtaaatcaggaaggaggcctgacggcggatgtccggggcctcatccgtcatggagaagggcaggagggcccgccatccgtcccccttgcgctggcggatgaaggtggccagttgcagcgcgcatttgcgccgcgcgtccggtgcgcagcaggactggaagatgttgtaaatggtgacgccttcttcttccctgcccatttcattgcaggtgaccagcccataggcgatcatggccaggggccactggtccggaccgatttcatccctgcgcgagggatccatgacgagggcggcaagccgcttgatttccgacagagaactggtttgatcctgaaaaaggcccatgcccgcatgatagccggcggcaggagcctgccaaggaaaaaagccgctgtttcctgccacccgcgttccggcagggcgttgcgccttccggcggctagcgggcggagattctctccatattgtccgcaaccagggcggccagttcttcctctttcatggagagggcttgcgcggcgttccggtaaagctccggcaaggcctccgggtgttcgtccgattccagcgccagccgatggagcgggatggaggaaaggaggcccgggcgatccatttcacgaggccccacggagagaagccagttgccggaagggagctgcgcgccggggttcagggcacccgtccagccgtgcagcacggctttcagccggggatattccttcagcattcctgccagcgtgccccacgcgcggcagcagtgcagggcggcggggcggttcaggcgcgcggccagctccaggtgctgtttcagcgcttcccgctgtaggggcagccccggaatgccgcggcggcacttgtccagccccgtttccccaatgcccgcacgggggaattttttcaggaaggattccagcaggcgcatttcctccttccatgcagccgggttcaggcgccagggatgaatgccgaagaaaggcgtgacgtttttatcccgttccgccagaagggccacctgctcccagtccgccggggaggtgccgcagatgaagcgcggcgccgtgccgggtgcggcaggagcggggtgggtgtgggcgtccggaagattcgtcattgtttaatgggacagcgtgggcgcgtctgcgggttcaataatatcaaagctcagctttgccaggcgcaccgcggcggcgcccgtttccatttcatcatggatgacgttggcgatgcccgcatgatgcagggaagccacttccgaacggaatttggcgcgggctatcaccgtgatgttcgcgttggcgcccttgatctgcatgtaggtggacagggccggggcggggtccgggaacgtgaaggcgatcagccgtgcggtgcggattcccgccaggtccatggtgatctggtgctggatgtcccccaggaaggccagatggccgtcattgagcagggtcttgacggtgtccgcgttcaggtcgatgatgatgcaggggatgccgtactgggacaggctttcatgcagcctcctgcctacgggaccgtagccgcagatgatggcgtggttcttgattccctccacgcgcgtgatcatggtttccacgctgaggcgttccctttttgtcttcaggcccggaatgcgcaccagcaggggggtgagcttccgcgccgccttcatcagcaggggcgtcatgcccatggagacggctgcaatggcgtacacattggtggtcaccagcgccggaatgggggtgatttcctgcatgaagggaatgagcaccagggagaattcccccacgttggtcagcgcggtggaggccatgatgcccatgcgaccggggattttcaggaagcttgcggccacgatgcaggccacgaatttgatcgcgaggacaaaggcggcgaaggtcgccacatggccgatgtgctcccacaggtcgtcaatgtcaatcagcagcccggcggaaacgaagaagatggtcaggaaaaggtccttgaaggggagcacttcactgaggacgcggtggctgtagtaggagctgctgacgaaaagcccggcggtgaaggcccccagcgcaatgctcaggcccagcaggctggcgagcatggcgatgccggaacagatggcgaagaccatcagggtgaagagctcccggctcttggtccgggccacggccagcatgatgcgcgggagcaggtagtggccgatcagccatgcggcccccaggaagacgagcccccgcaggacggccatgccgatgttgagagcggtttcccaggagtcgggcgtggcggcgaagatctgcggcatgatcgctaccagcatgatggcggcaatgtcctggaacagggcgatgcctaccgccatttttgccccggaggtgccgctcaggccgaattcctggaaggatttcagcgccaccgccgtggaggaaaggcccatgatggccccgactgtcagggaatggctcatatccatgcccgtggcgtaatggagccccaggccgaaggcggcggtgcagatgaacatctgaatgccgccgccgaccagggccgttttccgcaggtgcttgagctcgtcaatggaaaatcccaggcccagcgtgaacatgagcaggatgatgcccacctcggaaagggcctggatgctgacgtcggaattggggatgtggtccaggatgccgcagttggccagaatcaccccgcagatgaagtagcccgccagcagggactgccggaaatgggccagaatgagggcaatcgcaatgatgcccatgaagacgacggtgagcagggtgaagaagggaggcgcggcgttggggcctccggaagccagcagagagagaaccatggcggtcgggaaaaggggctacggaatggtgatgaggttgatttccggcgggcagttgaagcgtcccggccctatgtagcctatgccgcgggtgacgaagacctgcttgtcttcataaggatggaagccggagtacatcgtttccccctctgacgtcagcaggggggtggaaaagaagggcagtttgatctggccgccgtgcgtatggccggagagcatcaggttccagtgatagccgcccagcaattccctccccttggggttgtggctcaggacgatggtgggcatcgcggattcttcccccaattcccgcggactcatgcaccggtccggaaagaagtccccctcgcgcaggtctcccagtcccaccagcttgaactccgcgttccccagcctggggatggtgacgaaggctgcggaattcctcagcagggtgaaaccgccttccttcaggatgcgctccacgttgtccaccagggccatgtcatggttgcccaggcacgcgtaggccggggcgatggaagagagccgtttcatctgcgtgatgtagtctcctgcgtgggtggcccgcagaaaatccgtgtacaggtctcccaggaacacgatcatgtccggcctggcctgttccgccatggccgccgctttttccagcaggggaagattggtgtggacgtctgacagcaccaggatgcgcagtccggaaagtcccggaacgcagcccgctggagcggtgttttcactgaattccagatggttggcctcccagttcatgtaggaggccagcagggaacccagcagaatgactgccgcggctgcgtacaggagtttgcggagcagggagcgttttttggagggggtggagtccgtagtcatgattgggcgggattgagaatagccagttccggcatggtgaacaagccgttgcggcgcaccaggacgccgtccaggtaaatatcgcctccgccggctgctgccgtctggatgcataccatgtcccagtggatgcgggactggttgccgttgtccgccacgtggtaggcctgtcccggcgtcaggtggaaggagccggagattttctcgtcaaacaggatgttgcgcatggggcgggtgatggccggattgacgccaaaggcgaattcccccagccgccgcgcgccggggtccgtatccagaatggagttgagctccgcggtcttgtcccccgcctccgcatgcaccaccaggccgttttccagcgtcaggctgatgttgtcaaagggaataccctggaacaggctcggggtgttgaaggaaatgcggccgttggcgctgtcaatgacgggtgcggtgaacacctccccgtccggcaggttgcattcccccgcgcacgggatggcgggcagccccttgatggaaaaggaaatgtccgttcccggtccggtgatgcgcacgtgttccgccgcctccatcatggcggccagcttctgcatggcggggcgcagggcgccgtaatccatcaggcaggtgcggaaatagaaatcctcaaactcttccgtgctcatggcggcctgctgggccattccctctgacggccagcgcagcccgcaccagcgcgtgtggcggatgcgcctctgggagacggggttcagggccttcatggcaacggccatattcttctggggaacggcggacagctcaaaggcgttcccgccgccgcgtatttctatataggcgtccatctcctccatttccgccaggcggtggcggccgatgatgccgtattgctcctccgtggctccggagagcatttcccggttcagccgggactggttcaggcgaaggaagggcattgcgcctgcggcgcgcacctcccggataagggctattcccatttcctccggaatatccgttaattccagcaaaacccggtctccgggacgcagggtggtggaataccctgcaagctgggccgccagggcctgaaaacgggtgtctctcatgcctttattaggcgaataccggggcctttttgtcaagccggagacttgccacgggcaaaaaactgtggtttcatcccccggatgtccaagttgcccaaattaggaatactcggttccggttccggttccaactgccagtccatttatgacgccatccggtccggctccctccgggcggaaattgccgtggtgatgtctgacaatccggacgcctacattctggaacgcgcccgttcctggggcatcccggcggaggtgatcgactgcgggggatttaaaaccaaattcccggaggcgtcccaggccgccgtcgccgcgcgcctgaaggaatacggcgtggactgcgtttgcctggccggattcatgcgcctggtgaagcatccgttgctgaaggaattcccttcccgcattctgaacattcatccttccctccttccttccttccccggccttcatgcctgggagcaggccgtgaaggccggtgcggcggaaagcggctgcaccgttcactacgtggatgacggcatggacacgggccccatcctggggcaggcgcgcgtgcccgtgctgccgggggatacgccggaaagcctgcacgcccgcattcaggtgcaggagcatgccctttatcccgccatgatcgcccgcgttctggaaacgctcgcataacccgctgcgtcttttgaccggaggacgttccgccgctcctggaggaacggatgacaggatgactgattctcttgtcttgttctgtgaacggaatccgttaaaaaggagtcctcttttcaaacaaaggataaaaaacaaccatgaagatgaacccttccatcgccctgtttgccgtttccgcccttctggcgggtgtggcgggcgcgcaagaaaaggctgccgaagctccggcggccgaccaacccaaacaagagaaagaaattactgtgtctcccgaacagatgaaaaaggacctgggctattttctgggtttccagagcggacagcagctcggctccattcccacccttacctttgacgacctggaccaggaatccttccttcagggcatcaaggacggcatggtccgcaagcccgccaaggaccaggaacagctgaaacccgccctggacgcgttccagaagcagattgacgaacgcatctccgccaaggccaagtccaatctggaagccagcaagaagttcatggaggaaaacggcaagaaggcaggcgtgaccaccacgaaatccggcctccagtacaaggtggtgaacaagggcggcgaagaaaaatttgacgagaagaagttcaagaaccccatgttcaaggtgaagtacaagggcacgctgctggacggcaccgtgtttgacgacaccaagggcaaatccgtggaacttcccctccaggtcatccccggctttgccgaggcgctgaccaccatgcccgtcggctccaagtggatcgtgtacatcccttccgagctggcctacggtgaaaacacccccggcgctccgatcgagcccaattccccgctcatctttgatctggaactggacggcatttcggaagccccggctccccagggcggtcccatgagcatttccccggaacagctccaggagatgctcaagcagagcggcgcccagcagcaataaggtaagatttccaagccagggccgttcccgtgaggggacggcctttttgtttttgcaggtaccgccttcatcaggagggtgaacggtcaatctgggaatttataatccttcttcttctttaaacttccatatcttgcttgtattaaaagtattgcattaataatttttgaaatggatggagagatagtttaaagaagcctgttttattccccttcatgatttgcttaagaagagtcattaacgaaaataggcttgccaacggattataaatccgggtattactggtcataatatcattgatacaatatgagacttcatctccccccttctttgcgttccgcccttcttgcatccctggtttccttctccggtttttactcttactcccatgccgccacatcggcggatttctggcaggctcccgcgtttggcggtcctgattttacgtggacgggggcagggggaggcgatgccgtagatacggcgggcaactgggaaggggacgccgccccctcccgccaggagaataagggcccgcatttgatttttaatgatgtagacgttacggttacgggcactcctcccaacacttcggatggcggcggcatctccgtgacggggaacagcaatgtgtccgttagcctgggacaatggggcggcagtgtttacgtaggcgccggatccactctttccaccaccttcagcaaccagatcaagagcatggaggcagaggggcacgctaatatttatgtggacggcacgctgaacctgaccactccgggaggcaatctcaactttgacaacggtaccggttccggcagccactactggcacatcgggcttgacgggatgatcaacctgtcaaataccactacagtgaccaagaatgaccggacgtggaatgtagaggtagtggttgcgggcgccatggaagcgctgacggttaccaaccgcgagctggtggacgatgccctgctgacccgctatttcatgtccaccggggctgatctgggggcttccctggattcccttcttatttggaagcaaaccggggaggacacctatgaggcattgacgagagtcgattccgccgaccagctgggagccggcaatttcgtgcttgtctccaacggttccggcatgtccgtgcagtatcagggaacaggctacaatatggaaacgcttgtctggaattccactaccggtacctggagcaacactggaacgggctggtacaagagtggagatggaggcaagacggatacttccttcctgaacaatgactccgttattttcacggctgcggaaggggttaaaaccattgcgttgaccggcaacattatcgccggtaccgtaacgttccaggacgggacgaactacaccttgaacatgggagccggggattcccttcaggcggaagccctttccctcggcagccaggcgacgcttacgcttggggacgccgccattacggggggaaccttcacgctcggcaataatgcgggcctcctcgtttccgaagggaagaccgcagcgatcgcttcttccatcaccttcggcacgggcaataccttcacgctggggaacaacgcttccctgacgctgggagacgccacgcatctcatggagtccttctcctccaccgtcatgggcgggacgaactcctccctttccgtctggctcggcaatacggacgggagcgtcaccctttctcctggatccacgctgaaggacatcaccgtatatggcaattacgccgccaatacggccagccagcctgcggcggacacgctcaacggagcaaccctgcatatcggcaacggcgccaatttcatcattcgccccggagcgggaacgattcgtccttcggaccgcatcgtcgttgaaggcggcatgtacgtcctgatgaaccacaatgccgcggatacggtcacgatcgcctccgacatcgtaggaggagcgggcgtcacccaggatagttcaatcaccttccgccgcagtgaaaacctcaacctgaatatctccggcaacgttgactatgcaggaaccatgcagctggaccaggcttccggcggttacggtccccgtgtaaccttcctgaacaatacggttaacctgggcggcttggccgtcaattactgcatcgggggcttcaccctcaccaattcgcaggccaccatcggaaccctcagcatgtcgagcaactgggcgagcagttccattcaggtcaactccggttccgtcgtcaacgctacgaacgtgcggctcctcaagaacgggaccctttccatcaacaccggcgccgagttgaatgtcacgggcaccaacagcgaccacggaaccggccgcagctttatcgtggacaacggcagcacccttactcttaacggggggcttcttaccggctccgctgcgctgaacctcgggtacagcggaacggggaccttccttgcttccagcggcacggccaacctgggcggcctggacttctgggccaatggcaatggagtattccgcgggagattccagttgggaagcgcaacggccggaacggcccgcgtcaactttggcggcaacatcgttaactttgccagcggcagtgaaattacgctcggcatgggaacgctgggagccacggccaactggtccgtgacctacaataacgagttcactccctcctatatcacgctggcggcttccaacggaagttatgtggataccctggacgccggggacaagacaaccggaagaaccattacctttaataccggcctgaccggcagcggcaagctcacgaagatcggcgccggcaccctggtgctcaatggagctgccaaggtgccggttcccgcggaaggtgaaaccgccgccgttcctggtttcaccggcacggtggaattgagggaaggcgcgctgaccgtgaaggactccagcgtcatcgggcaggggacccttcttatcaacggcggcctgaccgtagccgtgacttccgcagacggttattccctggatgccggctctacgctgggaaccatcaatcttgacgggggcaccgctactttggcggctgctctgaccctgaacggaggctccctgagctttggagccctgagtacggataccgcggcattaaccgtcaattcagtggcgggcaccggcgctacggctctccagataggcctttcctccgtcaccgccaatacggaatatgccctcctgcacggaacgggcatgacggatacgtccatgttcacgctcggcggctccgcggctgaactttacaaggctacattcaccgtcagcgatgatacgctgtacgtctccctgtccgacaaggacggcttgctgagatggaagagcggcaactggaacacggacacctccaataccgcctgggaccttgacggcactcccacggcttacgccgatggacagaccgtgtacttctccgatggtgcggacgtgaacaagactgtaacgatcgtcgggaatgttgctccgggtaaaattaatgtttccggcacggatttcatttttgctggtgacggctccattaccggggatacgacgctgaatctgctggacggagcttccctgaccatcaacaatgccaactcctatagcggaaacaccgtattgtataacggcagcaagctcgtcgtcggcaatgccggcgcgctgggcacaagcacggttctcctccagggcaattccattctggagctgaccacgggcacgtggaacggcttgggcacgcgcctgaatgccaattccacgggtacgctgaagctgagcgggaatgcctccggcacgacgacggccgcgctgactggcgtcaaatatgatgtgggcgcgggaactaccctgacgctttccgccggaacttacggaaacacgatcaccggcgccggttctctgatatctgctgccggcacaacggttttacagggtgatgtcaatataacgggaagctatactttgatggcgggtgcgaatgcggctgcttcctggacgctggattccggcgcttccctgacggctggaagtttcatcggccgtaatgaatacaacgggacgacgacgctcactgtcaagaaggatgctttcatgaacattaccggcaccctgcggatttcccgtgacgggaagggggtcatgaacattgaacaaggcggcatggtcctggctcagacgctggatctggggcagaattgggccggagccgccgccaagggcgccaccattaatctgaatggcggttccctgcttctcggagcgggaggcatgactgcgtccggcaataccaatacgattgtcctgaacatgaattccgggaccctgggaacgacggcggcggaaggctggtcctccgcctataacatgaatcttgccggcaacgtgacggttgatacccgccaatacgatgcgggaaccaaatcatacaatgaccagtcttccaccaacatcaccctcgggggcgtcctttccggcgccggcggtttgacgaaagtcggttccggcacgctgaccctctccggacagaatacctacacgggcttgacgaacgtccaggccggcacgctggcattcacgaatgcgaacgccatgaccctgggcagcatctccatgggcgcgggcgccaaaatgaccacggcctccgccctgacgctgaacagcggcgctacgctgacctttgacatgactggagtcgtggcaaacggcccgatcatcaatatccaggcaggggccctggctctgacggatgccaactgcacgctgaccatcaacaactatggtgaactggaagcatccgactacgtcctggcccagtgggctgcggcgggcagcctgaccacggattccttcacctggacgccggacatcacccgggaaggctttgaatactccgtcgtggtggaaaacaaccagctcgtgctgaaagtcgtggacgtcagcggagacaacggttttgtctgggacggcggaacggaccgcaagtggatcaacaccagcattgacggctggaccaccaagctgacgggcgtggacacgctgaacgaccaggaaatctatttctccgctgcggaagcgggtgaagtgaaggtctccggtaccgtgactcccaagagcgtcgtcttcaacagcggtacttacacgctggtcagtgatccggacaacgcgggttatattgcggactccgttgcccccactacgctcaccgtgaacggcacggccaacgtcaccctgaacctggcgaatacctacaccggtggcacagtgctcaacggaggcactcttaccatcggagcggacgacgcgctgggtacggcgggtgacattacctttaacggcggtacgctggcttatgcggactccgccgccggtagggacgtgacgggatatgacgtttccagccgcgtcaaggttggagacggaggcgccctgaacgtttccgtaatcggggcaggggacactgtctcctgggccggactgacggctgacgtcatgggcgcgggcaccacgctgaccaagacgggggacggcacgctggcgctgggatactccgggaataccctggcccacctcaccgtggaagagggaacgcttgccttcacgggcggagcgaccatcggcgtgaaccccaataacgccaccatcgtccgcgtaagtgaaggcgcctctctggccctctccggcggaaccgtcaacctgcacgcccagcttaacggcgcgggcaccatcaccattgggacggcggatgccgcgggacaggtcaacatctccaatacgggcaataccaatttcaccggccgtctggaactgctcggaaacggggaaaatatgagtaccaatgccaactgggcggctttcggcgcggggaatacgctgggaggcggcaccattttcatcgacggcaagggcttccatttctccgcgggcacgacggcggccaactttgaaatcggcgcaacccacggcacggtgcagaacggttcttccggcgccacgtacaccttctccggtaatctttccggttcaggcgcatggggcatgtccacgaacgtgcggatgaccaatatcctcacgggctccctcaaggacttcacgggaaccctgtccaccgatgaaacctccgccaacaacagccgccaggtctggaacttcggcaacggcggcgcgagcgtcacgggtgcggggaatgccatctttggagacggcgccatcctggcgggcaacacggggtctgcggacgccgggctggccgcacaatacaacgtcaattacaataacgcggaactggtgctgaatgcgctggtgcagggcaactccaacctgacgcatgcaggcacgggcaccctgatcctggatcaggccaataccgctacgggagccctcggcatcacgaatgccgacgccgtggtccagcttggcacggcggacaaggccggccagtgggccggcaccgtgctgaacggagcgggaacgctgaaaatcgttaacggatcactgacctccgccatgacgcggggagaaggcgccaccgcgggcatcgtggtggactccgccgccgccatcaacctggggggcaccaatggcgacatgctgaaaggcatcaccctggctgccggaggcaagctcaccaacgtctccggagacattacggtgggtgcgggagctacggaaacgctgaaccttaccctgggcgcggacaacgtcaaccagggagcggccggtacggccatcattgaccagggagacggcaagcttgtcatcaatgattccgccacggtcaatctggatattgacgccattgtgaacaccctcgtcgcccacaaggacgccggggtggaaagctggctgacgctcacgaccggaacgctggaatgcgccaatctgggcgacatccagttcagcaagatcctttccaactacggcatccgcgtcacgggcactgacggcggcagcctggtcctcagcggacaggtcagcggcctttacatggtggacggcaccgcctcctccgatcccgatacggttacgaactacggcacgctgggcatgtacgccggcgtggtgatcgcccaggacaagacgctcaccgtccagttggcgggagctcccggagataccgacggcgacggcgcggtcatcaacaacctgctgggcgcaacgggaagcacgctgaaggtggaaaacaccaatgcggacggaggcaacgccgttgtcatcctcaacaacgaacgcctggaaacggggctgcccgcaccggacgattatgccggggcggactccatcatgggcggcagcatcgttggggaaaacggggtcaccttcatcaagcagaacgcgggcaagctcacggtcaacggctcctttgtgacggacaccctccgcatggaaggcggcacgctcaccctgaacggtgatggcagcagcttcaaccatgtggtgctggcaggcacggcggaaggcgtggttctggatgtcaaccgtaataccgtcatgggagacctgacggacagcggcgaaggcgcggacctgaacatcggcagcggagccaccctcaccattaacgatgccagcagcctttccgccagcaccatccagggcagcggcacgcttgcccttcatgatacgcttgccctttccggaacggcttccctccagggcggcgtactgctggacctggtaaagaacggcgattccacgggaacgcttgaccttggttcaaccaccggcaacaccgttgccggaatcagcggccagggaaccttgaagagcaatggcggcgctctggccgtcaataccggcaattcgggcagcggttccgtcttcagcggcacgctggaaggccgtgggcagctcaacatctccggcaatgcggggcagacgcttgaaaacgtcatcaccgccgccggcagcaactgggccatcaacaacacgggacgcctcaatatcaagatgggcggcacggtagaagacccgagagccaatacggctcttaccctcagcagcctgacgctgggcgacgggtccagcacgaacctcaccttcaacacggactacgccggacccatcatcagcgtgaccgggaatatcagcatcagccagggagcggaaataaccctcagctctaccggcaagaatgaactgacgctgggcgcggacggcagctacacgctcatgcatgctgatggaaccatcgacctgggtggaagcgacaggctggctatcctgctggatccctcctcctccgccttcaagaaatttgaaaacgatgcgtacctggtgatggaaaacggcaacctcgttctggtggctacggcatccaaggacaataaatacgcccgtcttgcggatacggtcaattccagggccggtgcggaacttctctggaacctgcccggggacctggccgcagactccatcctcaagaaggtggatgacgccgtaggagccctgacgtcttccaacccctcggaagcgaagcgggtgatggcagccgtagcgggcagcacggtcaacgcgctgggaacggcccagaaggacgccctgcgcgaccagatgggatggatcaggaaccgcaccaccctcatgggcgtcaaccccgcctacgtcaacgaagacctcccctacttccacatgtggatggaaggcacgggctcctatgccaagctggacaccaggggggatgaaagcggctaccagctcaccacctggggcggcaccgtgggcatggacgtggacctcagcgaccattttaccatgggagcggccttcacggccaactacggcgacctgacggccagcgcggcggactctgcggacggccacctggacagctactacgccaacctcttcgggcgctaccagagcaagcgctgggcgcacacattgatcctgacgggagggtggaacgacgcgaagctcaaccgcacggtcaactacggggaaggcagctacaggacgcagggcaacaccagcgggtggggctttggagcgatgtatgaactgacctacgacgtgtacctcaatgaagacaagagcagcatcctgcagcccctggccaacgcctcggtagtaaccacgagaatggacggctacacggaaacgggagcggggaacgcgggcctgaacgtaggcaagcaggaatggacgacgggaacggttgcgctgggcggccggtggatggggctcattggcagcaacatcttcggtcgagaagcgctggctgagttccgggtgaacgcggcccaggacatgggcgaccgccgcggagaaaccaatgtggcgctgctgggcaaccccggcttcacgcagagagtcagaggagcgaaggtgggaatgacggctctgcaaatcggagcggggctgagcgtgccggtgggaacgcagggaacggtcttcatcaacgggaacgcggacttccgtgacggagccaactcggtgaacgggagcgtgggctaccggtatgacttctaaggagagttgaagtttgagagttgagagtggagcggagacgctctgctctccaaaccagcagggtcgttccggcattgtccggggcggccctgcttgtgtaaggaaatagcgtcctccggagtaataggccgtgtgggctgaaaggacagaatggaaaaaagaaaatggtgtccatcctgtccatcaagtccattttgtccactactctccccgtgccgctcgccgccctccacacggcacgccccttccgattctataaaacggcgcagaatactcctgcgcgccctcgtccgctgtctgatgtcagaaaaatccggaaggcgtggaatagggccttttttatgcgattgcggcggcttttcgcgggggttgcccctacgcgcgcgcacgcgttttctaacattagtcttgcaaaaaattaagataagcgtagtatatttcagttatgtccgaagataccaacgaggttgttgaaaccaccgtttccacgacggcgcagcatgaatacggcgccgcgcagattgacaaactggagggcctggaggccgtgcggaagcgccccggcatgtacatcggggaccctgacgaaagaggcttgcaccactgcgtatttgaagtgctggacaactccattgacgagcatctggccggctattgcagcaagattgacattgtgatccatgtggacggctccatttccgttgtggacaacgggcgcggcattccggtggatatccacccgaagttcggcatccccgccgtggaactggtgctgaccaatctgcacgcgggcggcaagttcggccagggcgcctacaagtactccggcggtttgcacggggtgggcgccaagtgcgtgaatgccctgtccgactggttcagggcggaagtgcgccgcgacggcaagcgctaccagatcaagtttgaacgcggcaagacgatcgagcccctccgcgcggtgggcgcctgcgcctgtgaaatcacgggcaccacgatcacttttttcccggactccaccattttcacggataccacggagttcaaatttgaccgcctgacgacgcgcctgcgcgaactggctttcctgaaccccggcctggtcatcgagctgattgacgagcgggaggccccggtgcgccgggaaaccttcttctataaggaaggcattgtggaattcgtgcgccagctgggccggaacaaggaattgatcaatgaggaacccatctccatttccggcgtccggaaggtggaagtggagtacgacggcaagaagatggaggatgacgtcctggtggacgtggtgttccagtacaacaatacgtatgaaacgaacatcctctgctttgccaactccatttacaacggggacggcggaacgcacctttccggtttccgcggcgccctgacgcgcgtcatcaacggctacgcgaaggcgaacggcctgctgaaggaaaaggacccctccctgagcggggaggacgtgcgcgaaggcttggtggcggtcatctccgtcaagatgcccaacccgcgcttctcctcccagacgaaggacaagctggtgaacacggagattgaaggcgtggtgggcaacgtcgtgtacgaggaaatcaagacgtactttgaggaaaacccggcgatggccaagaagatcatcgaaaagagcatcacggccgcccgggcccgtgaagccgcccgcaaggcgcgcgaaacggtccgcaagagcgccctctccatcggcggccttcccggcaagctggcggactgctccgaccgggaccccgccaagtgcgaactgttcattgtggaaggtgactccgccggcggctccgccaagatggggcgcgaccgccgcacgcaggccatcctgcccctgcgcgggaaggtgctgaacgtggaaaaggcccgcctggacaaagcgctggggagcaaggaaattcagaacatgatcacggccatcggcgccgggatcggggaaggggacgatgaagcctccttcaagctggaccgcgtgcgctaccacaagatcatcatcatgactgacgccgacgtggacggcgcccacatccgcaccctgcttctcaccttcttctgccgccacatgccgcagcttgtccgcgccgggtacctgtacatcgcgcaggcgcccctgtaccgcatcatccgcaggaaaaaggaggaatacgtgcaggatgacgtagccctgaaccgcaaactgattgaactggccgtcaatgacgtgaccctccgctttgcggacggttcccgttcctttacgccggacgagctctctgccattctggaaacgctggtcaacctccagcgctacacggaatccatgcaggcgcagggcggctccctggaagacctgctcagccaccgggaggctaacggcgatttccccgaattcctggtgaaggtgcgcagcggcaacgaagaggaaatcctcttcttccatgacatggaagccctcactgccttttccgaggaaaacagggacctcttcatcttcggcatgcccacggaagaggaactgctggaaaaccccctcccggaccgggaagggcccagccgccgctccatcacccatgaactgcatgaggccaaggctattgcgcgcgccctgacgcgcctggctgaactcggcatccccgggaacatgctcgtatccatggatacgcccctgtttgaactggtggaaggggaaggagacaaggaacggaccacggccctcttctccgtaatggacattctggaatccgtcatctccatcggcaagcgcggcgtggaaatcacgcgattcaagggtctgggtgaaatggacgccaaggacctgttcaagacgacgatggacccggaacggcgggagctgctccgcgtcatcctgaatgacgacaacgccgtcagggctgatgaaatgttcaccatcctgatgggggacgtggtggagccccgcaagaactacatcgtggaccacgcgctcaacgtccgcaaccttgacgtttaattcctacactttctcccagaaccatggaaaacaatagaatcaaaccggtggacgtagccagtgagctctccacttctttcctggactactccatgtccgtcatcatctcccgcgccctgccggacgtgagagacggcctcaagccctcccagaggcgtatcctgtacgccatgaaggaactgaacctgtcccccggcgggaagacccgcaaatgctccaaaatcgtgggtgacaccatgggtaactaccacccgcacggggacgccgccatttacggcaccctggtgaacatggcgcaggactggtccatgcgggacatcctcgtcatcgggcagggcaacttcggcacgccggacggggacccccccgccgccgcccgatacacggaagccaagctctccggcatgggcgtggccctgatggcggacctggacaaggacaccgtggactttgttcccacgtacgacaacgagcacacggaacccaccgtgtttccctccgccttcccgaacctgttggtcaacggcggcacgggcattgccgtggggatggcaaccaacatgcccccgcacaacctgggggaagtggtggacggcatctgcgccgtgattgacaacccgctcatgacggtggatgaactgcgccagtacatcaagggaccggacttccccaccgggggcgacgtgctgggcttttccggcattgacaactacttccgcaccgggcgcggctccgtgcgcatccgcgggaagatagacatggaaatgacggactccggcaaggacctcctcatcatccgtgaagtgccgtacggcgtgaaccgcgccgccctccaggaacgcatcgcggaactgtacaaggacaagatcctgacggacatttccggcatccgcgacctttccgacgagaaaacctgcattgaaatcgaactcaagcgggacgcccgcccgcaggtggtcatgaaccagctttacaagctcacctccatggaaacctcctttgcggtgaacatgctggcgattcacgacaaccgccccaagacgctcgcgatgctggacgccatcaacttctacatcgagcaccgccgcgaggtggtcgtgcgccgcacgcgctacctgctgggggatgcggaaaaggacgccgaacgcctggaagccttcctgctggcccttcaccacatggatgacttcatcaccatcatccgcgactccaagaacagggaggaagcccgcgaacgcctccagaactacaccttctccacgcagacggcggaaagcctgggcatcctgatccgttcccaggcctccgtgcagggggaccgctacatctttacggaacgccaggtaaactccatcctggacctgcgcctgtaccagctcaccgctctggaaaacgacaagatttccggggaatacgcggaactgctggtccgcatcaaggactatctggacatcctggcgaacgaatcccgcgtgctgggaatcgtgaaggatgaactcatggccatcaaggacaagtacgccacgccgcgcgtcacgcgcatcattcccttctccggggacatggccattgaagacctgatcccgaacgacacgatgatcgtcaccatcacgcacagcggctacatcaagcgcaccaactccgcggaataccgcgtgcaggcccgtgggggcaagggcgtgaaggccgccaccaccaagggggccagaaaggatgcggaggcggacttcatcgagcacctcttcgccgcccagaaccacgactacctgatgttcttcacgaacaccgggcgcgtgtacgtggaccgcgtgtatgaaattgacgaggccgcgcgcagcgcgcagggccgcaacatcaagaacctgctggacctccagccggaggaagccatcgccgccatcctgcgcctggaacgccgggtggatgaaaagggcaatgacatcacctttgcggaaggcagcggcaacgtggtcttcgcgacgaaggacggcacggtgaagaaaaccagcctgaacgactttgtcaactaccgcaaggccggcatcatcgccatcaacctggaggaaggcaacaccctggtgaacgcggaactcaccaccggagaaaatgaaatcgtgctcgtcacgcatgacggcatgagcatccgcttcccggaggaagccctccgcacccagggccgcaacaccatcggcgtgcgcggcatccgtccgcgcgagggagactacgtggtggcccttgccattgtggacccgcagaaaaccctgctggtggcctctgaaaacggccttggcaagcgcacctcctttgacgaataccgcacgcagggccgcggcggcaccggcatcaagaccatgaactgcacggacaagaccgggaaggtggtatccgccacggtcgtttccgaggaggatgaactgatgctcatgaccacggcggggcagtccgtccgcatcaaggtagccaccgtgcgcgaaacgggccgcgccacccagggcgtgaagctcatgacgctgaacgacggcgaagccatccaggacatctccatcgtcattccggatgatgaagacgaggaaggtgcggagggagcggaagacgcggaggccggggaagattccggtgaagcggaagcccctgcggaagaataaaactacatggaaccccgctccggaatcagccggagcggggttcttcatccgccgtttttatggaagaaaccctttccctgcaaaagtgcgccgaacgcctggaacggcgcggattcagatgctttgtagttccgggcctgaaggaagccgcaggcgtgatgcgcggcctggtgcgggagttcaacccggcgtccgcctcctacggagactccatgaccttgaaggccacgggaattcttgacgacctgcgggccaatccggacattcaattttacgacggctttcttccggacatggaccgggaggaaaaatgggaaatccgccgccgcggcatgacggcggacctgttcctgaccggaatcaacgccgtcagcatgaaggcaaccctgcactgggtggacatggtgggcaaccgcgtggctcccgtagcgttcggcccacggcacgtcattctgctggccggagccaacaagctggtggccacgccggaggaggcgcgggaacgcatccgccgcatcgccccgctgaacgccaaacgccatgaagacttcaagacgccctgcatgtacacgggaacctgtgcggactgcaactccccggaccgcctgtgcaacatccatatgtccattgtcaaatgcttccccaagggaaggatcactgtcatcctgacggaggaatccggaggactctgagccgttctgccatgcccgttcaatcccggatagaaatcatggccccggcggggtcgtttgaatccctggccgctgcgttgcagggcggggcggactccgtctacttcggcgtggggaagctgaacatgcgttcccgcgccacggccaacttttcagaggaagacctgccggaaatcgtggcccgctgccatgaggcgggagctaaggcctacctgacgctgaacatcatcgtgtatgatgaagagctggaggcggtgcatgccctgtgcggctccgcccggaaggccggagtggacgccgtcatcgcctccgacctggcggtgatcgcccatgcccgctccatcgggctggaagtccacatgtccgtgcaggccaacgtctgcaacatggcctccgtcaggttctacgcgcagtacgcggatgtggtggtgctggcacgggaactcactctggcgcaaatccggcacatcattgaatccatccggaaggaggacgtgagggccccctccggggaactgctccgggtggaaatctttgcccacggggcgctgtgcgtggccgtgtccggcaaatgccacatgagcctggccgcttacaactcttccgccaaccggggcgcctgcttccagaactgccgccgcgcctaccgcgtgacggatgaggaaacgggcaatgaactggtgatagacaacaaatacgtgatgtctccccgggacctgtgcaccgttccggtgctggaccagcttctggacgcgggcgtctccgtgctgaagctggaggggcgcggccgctcctcggattacgtcagaacggtcacctccgtgtaccgggaggccgcccaggcatgcctggacggaaccttttccgcagccagggcggaagcgtggatgaaacggctggaatctgtcttcaaccgcggattctggcagggcggatattacctgggcgtgaaatggggggaatggagcggttccgccaacagccgcgccgccctgctgaaaatccacattgccaaggtggaaaacttttataaaaagaacggggtggcggccctttacctggaagccggcggcttgtccgcggggcagaccatcctcattgcaggccccaccacgggagccgtccgcgtggaagtggaatccatgcggcgggagacggcggcgggcatggaacccgtggacgccgcgcaaaaaggggaaaccgtctacctggcggttccggaacaggtgcgccgccgggacaaggtgtacctgctgcgcccccgcacgctggaagactcctgaacttcctattccgcaggaatgtaacaacaaggccgccggaagaaaggcaaacggctgttccctctttctccggcgcttgtttttcccggatgccggggatgaacggagaaatgccgctgctcattctcccgttccctgtccgggaagacgttaattcccgtcgtcaggcagttggagcaatgggagaatgaattcaggcctgccatgaaaaaaatcctgggcatggaggacgggcggtaggattccccatgccgctttctgccggagccgtttttctacaacttccttcccttaaaatcagatattgaattccggaattgagagtccggacggatttaatgatggactcaccctctgctgattaggcagaaaattaatcggtacggaaattcccgttgaatgaaaaagaatttctcctgcgtactagtgtaaaactgtacgccatgtttgactcatgttccatcctgcgccttctctcctgcggctgtgccgtactgggagccggaatactccacgcttccggactgcagccctggctgcgggaattgtccggaattccgctcgcggcctccgcagagggaagaaaccaatggatgcagcaattatgggcgcggacggcggagcatgtatcttccctttccgatccgtctgccgcggatgactgcggggatgcgatggcgctgctggctcccgtgttccaggcatggccggacgggcagaaagccggggccgcgctggcggaaatcctttccgttccggcggagcgggtgggagccgtttcttcctgggacggcctgatgaagcatcaggaagccattctggaaaaagtccgcttcctccggctgaagaaactgacggcttattatgatgcggccgccatccgccgcgcggtgaaacgcaaccgggaaaaatacggggaacggtaccctgatgctgaggttttcctggcccggctggatgagtgggagaagaagctggggccgctggaccggtgggtggaccgggcagggccggagcaggcggaccaactgcgtgaactggtggaactgcggaaaaaggcccttattgaatccctgccggaacaggactccctgcgggaatgggtgagcgtgcggcgtttcaacccgtccggaaaaagctccttcaatcatgaccgcccggccaactggcagggaatctccagcatgccgggtccgggccgcacgtaccgcagcggcatcgtgaaatttaacggcatctcctcttcctcccccgcggcgcagctgctgggggacgaccgctggatggggcatctggaagtggacttttccggggaaaggctcatgttcaccggaaaccgcttcggcaagaaggaaaacaggccctgggacgtctttgaactggacctgaaaaccgggaaaacggaagccctcaccgcccacatgccggcggatacggacagctacaactcctgctacctgccggacggccgcgtcatcttcgtcaacacctccggcatgcagggcgtgccctgcgtaaccggggtggactacgtggggaacatccacctttacgaccgggagaggaagacgacccggcggctcacctttgaccaggacaacaactggttccccgccatgctgccggacggccgcgtgatgttcctgcgctgggaatacacggagagcgcccactacttcagccgcgtgctgatgcacatgaatccggacggcagcgaccagaaggaatactacggttccaactcctactggcccaacagcctgttcaacgcccgcccgcttcccggcaggccgggcatgttcgcgggcattgtgagcgggcaccatggtgtcaagcggcttggggaactggtcatctttgacgtgaaccggggccgtaccgccacggagggcgccatgcagaaaatcccgggctacggaaaacccgtggaaaacgtcaccagggaccagttggtggatggattgaaaactccctattttgcggaaccgtatccgctgaatgaggagaccttcctggccgtctcctccccctccggagacaagggcgtcactaatgtggtctggtgcgacatgtacgacaacattgtccctctgaccgcttcatcctatttcatttatgcggaccccgcgccgctgcgcccgcgcacaaagccgcccgtgctccatgaccgcgtgaagccggaaagcaagacggccacggtctatatctccgacgtgtaccggggccgctccatggccggagtgccgaagggggaggcaaaattcttgcgcgtgttcatgtccgagtacagcccccgcaacaccggaagccactatgccatgggcatggaaagcaactgggacttgaaggtgctgtacggcaccgttcccgtgaatccggacggctccgccatctttacggctccggccaaccagccgctgaccctccaggtgctggacggggagggacgcgccctggcgctgatgcggagctggttttccgccatgccgggggaaacgttaagctgcatcggctgccatgaacggcagaactacgcgccgcccgccaaggcggtcatggcctcccggcagaagcctgccgccatcaccccgtggtacggtccggcgcgcaccttctccttcatgaatgaagtgcagcccgtgctggaccgccactgcgtccgctgccacaccgcggaagacaaggcccgcgcgggagtcccggacttcatgacattggaggccgtcaagggtgctcccgctcccgggtccgtcgcgtactggaacctgcacccctacgtgcgccgcaacggtccggaggggaactacctggggctggcccccacggagttcttcgcggatacgtcggaactctaccagctccttaaaaaggggcaccacggcgtggagatgccgcaggaggactggaaccgcctggtcacgtggatggacatgaacgccccctacctgggcgaatggccgggagagcgcaatgaaggattgctgaaacgccgctatgacctgcacaggcaattctccggagcggaacggaattacgtgacgatgaaggattccctgttccggagaaacgccagcggacctgttttcaacggggaaaggcccgttccgggagccagtgaaaaaagcgtgcccgtcccggaaccgcggaatgaaacgctgtccgtggatttggggggtagcgtaagcatgacgttccgccgcattcccgcgggaaaattcaggatgggaagtgaacgggaaaccccggcggaaaaacccgcctccccggtggagattgaacaaccgttctggatgggagaggcggaagtgacgctggagcaataccgccgctttgacccggaatacctcaatggatggtacgacatgcactacaaggaccaggtgaggcccggctacgacatggatgccgatccgcgttttccggccgtccgggtgccgtggaccagggccatggaattctgccgctggctttccgggaaaaccgggaaaaaggtgacgctgcccacggaagcgcagtgggaatacgcggccaggggcggagcggatacggacttcttcttcggggaacgggatgcggacttctcctcatacgccaacctgggggatgtgacgctgaaggagcttgccgtctccggcgtggaccccaagccgattaaaaatcccaaccgtttctgggacttcgtgccgcgggatgaaaaatataatgacgggaagcttcatctggcccccgtcaagagctacaagccgaatgcctacggactgtacgacatgatcggaaacgccgcggaatggacccgttccgaatacaggccctacccgtggaaggaaggggacgggcgcaatgaaagcctggactcccgcgttccccgtgccgtgcgcggcggttcctggtatgaccgcccccggcgggccacgtcctcctggcgctgggggtatcccagctggcggcccgtgtacaacgtggggttccgcgtgatgatagaagactgaatctgaaatggccatgaaactgacaaaaacgctctgcgcctccgcggctgccctctgctgcctgctggctttcgcctcatgcaggcagggaccggattccgttgccggtcctgccgctccggtggatgtgaaggtttttaatcatctggttgccgtgctggggcatgaaagccggactctggaactggtggaccccgcttccggagaaaaggtgaaaagcatccggctgggccagccgcccaacggcatggcgcttgacggtgccaccgcctatgtggcggaaggcggaccgcgcggcgtggtggaggtggtggacctggaaagcggggcgctgaaaggttcctttccggcgggccatacgcccatggctcccgtgctgcgcggaggtaagttgtatgtggcgtgccggtttgactcccaaattctggaaatggacgccgccaccgggaacgtgctgaattcctggaacgttccccgtgaaccggtggcgctggccgtctctccggacggcaggaaaatatgggccgccggccatttgcccgccgggaaggcggacggggatttcacggcggctgcgctgaccctggtggaagacgggaaggcggctcatttcccgctctccaacgggacgcagggcgtgcgcggcatggcgatgagcccggatggccgttatctggccgtggcgcacgtgctgagccgctaccaggtgcccaccacgcagctggaccgcggctggatgaacacgaacgccgtgacggttattgatacggaacagccggacaagccgcaccccgtcctgctggacgacccggatgcgggggcggccaacccctggggcgtcgccttttccggggatggcggaaagctgtttgtgacgcacgcgggaacgcatgagttatccgtgattgattttcccggcctgctggaccgcatgaagcgggaaaaccgggaaaacgaacccgtttccgaaaggctgggcttcctgcacggcctccgcacccgcattccgctgcccctgaacggtccgcgcgccctggcttctgacgggaaaaacgtttatgtggccggatacttctcggacacgctggcgcaagtccctctccagggggaagcgcaaccccggaaaatcgcgctgaatgaaggattccagccctcgcgggaaaagctgggggaacaatacttcaatgatgcctcccattgcttccagggctggcagagctgcgccacctgccacccggacggacgcgtggacggcctgaactgggacctgctgaatgacggcatgggcaacccgaaaaacacgcgcaccatgttcctctcccaccggacaagcccggtgatgacgctgggcgtccgcgcctctgcggaggtggccgtgacggcgggcttcgtgcacatccagtttctggaaccttccggggaactggcggaatgcgtgaatgaatacctgaaaaacatgaaggaggttcccagcccgtacctgatggcgcatattccctccaggcagcagacgcgggaggctgcctgtgcccagtgccatgctcccggagtggagcggggctccttgtccgaatccgcgcggagggggaaggaagtctttaaaacggccgggtgcgtgcagtgccacccgcacccgtacttcactaccaaggaactggtggctacggggacggccacggggctggatgaagggaaaagcattctggtgccctccctggtggaagtgtggcggaccgccccttacctgcacgacggccgggcgaagacaatccgggaagccgtcacgatgcacaacccgggggacatccgcgggaagacaagttctttaaatgaccgtgaactggaggacctggtcaattacgtacagtccctgtaaaggaggacaccatggcggcggatttacctgaaaaaacggaatggcgcggaaaaagcggcgcgcaggaacatttcttctgcatgacggcggaaccgggcgcgagctttgaggcggaactgcgttccctgatggacaggtaccgtgaactgggcggcggcggggaagatgaattcctgctgcgcttccacgtcagcgatccggtgcgccagtcggaaacgctgcgccggatggcgggggagcggaactcctacgtctccgtggtggggcagcccccggcgaacggggcccgcgtggccctggaagcatggcacatcggcggaatgctggaaaaaagacggaaagaggaccagtggggaacggtggtgacggcccggcgtccgcattaccggttgtttctggcgggcaggaaggaaacctccgctccggacagccacggccagatgcgggaggaattccgctggctggaccgcgcggctgccgcgcagggaggaaccgtgccggagctggttcaccgcacgtggatttactgccgggacattgacaacaactaccgcggattggtggaaggccgcaatgaatgctttggccgttacggactgaccccggagagccatttcatcgccagcacgggcattgaaggctgtacggaaacgccggggcgcctgctgcacatggacagcctgggaatcgtcgggctgaagccggggcaggtccgttacatggaggctccggattacctgtcccccacgcacctgtaccgggtggcctttgaacgcggcgcccgcatcgtgtacggggaccgctcccactacttcctttccggcacggccagcattgacgcgcagggaaacattgtccatccgggagacgtggcgcggcagacggaccgcaccctggaaaacatgaacgccctgatggaaaggagcggcggaagcctgtgcgacctgaagcaggctgtggtgtacctgcgcgactgggcggaccgggaaacggtcagccgccgcctgatggaatccccgctggccgccgtcccccatctgctgttgaaagcccccgtctgccgccccggctggctggtggaaatagacggaatcgccgtcaatggcgccggagacggtgcatttgctcccctgtaaaggaaccgttcccggaacagccgggagcggccgatttcacttgttatcccatgcacggaaatggtaccttacccccgcatgacctatcgccttaatacggaccgcctggtgttcttttccgtgctgttgtgggcgctgctgccgccgggcgtttttgcctgggaaggtaatccccccagtccggataatgtgcgttggctggaacaattctgttccagttatattcagttcctcaccatgggcggggtgttgtgcgtggtcatcggctttgtatgcgcggccttcatctggctggtgaaccgccaggactgggcgcggagccttaaaatcggaatcctgtttatcgtttccgccctgtgcctggttttgtacggcggctccctgtcctttgccgtgttctacctccccctggccctgatcaaccccgccgtgtactgcttcagcgtgagcaaggcggaataatcgggggaataatcggcggaaaatacgcggtttatttctcttttccgtggcggatgtccgtggcttccttcaggaagacgacggtggcggcgatggttttggcaatgtctccgatgcgctccagggagcggatgatgaagagcaggttgacgttgagggagggcgtgttttccctttccggggataccagcagggccagcgccttgcggtgggccttgtccagctttttgtcccgcaggcgtatttcccgtgcggcgtccgcgtcctgcgtttccaggcaccgtgcggcgtcccggaattcggagacggccatgtccagcagggggagcactatatccgtgcatagggactcccggcgcctgatggatgccttggcgtgcctggcgatgcccgtgacttcctccatgcattcctggagcttgtccccgcagcgggaaaaggtgagcacaagccgcaggtcggaccccaggggatggaactgggtgagcacggcggcgcagagggagagaacctggcgggtttcttcgctgagcggttccccgtccgcaatgatgccgttggccccgtcgctgtccgggccggagatgacccgttccaggacgtccatgtgtttcagcaggctgccgcagacggcgttgacgcgggtgcggatggcgttcagggccgcgtcatagtgggggaggatgtggttgccgggaggtgtcatgaggtgaatggcttggaagttgggctttttagctgaaacggcccgtgatgtaggcttccgtttctttttccgcggggttggtgaagatttgagacgtttccccgtattccaccaggcggcccatgtacatgaaggcggtgcggtccgcaatgcgcgtggcctgctgcatgttgtgggtgacgatgacgatggtgaggtcttttttcaggtcttccatcaggtcttctattttcagcgtggcgatggggtccagggcggcgcagggctcgtccatcagcaggatctgggggcggttggcgatggcgcgggcgatgcacagccgctgctgctggcctccggaaaggccgtaggcgctttcgtgcagcttgtccttcacttcgtcccacagggcggcgcctttcaggctgcgttccacggtttcatccagttccgcgcgcctgctgcgtcccgccacgcggagggggaagacgatgttttcataaatgcttttagggaaagggttgtatttctggaagaccatgcccacgcgcttgcgcagggagatgacttccacgcgcggatcgtacaggctggtgccgtcaatgcggatgtccccctggtggcggacgtccggaaccaggtcgttcatgcggttgatgttgcggagcagggtggattttccgcagccggagggcccgatgagggccgtcacgcggttggtttcaaaggtcatgccgatgttgaagagaacctgtttgcttccgtaaaagaaggagaaatcttccacttcaatgatgggatcgtcgtctggggcggctggttcagtcatgggatggtgaaggagaacggggttagaagctggaggccgcgtattttttgcgcaggcggttgcggatgaggatggccgtgaggttcatgaccaccaccagcaggatgagcagcagagtggtggcgaagaccatgggctgggcggcgtccgagtccggcgactggaaccccacgtcatagatgtggaagcccaggtgcatgaatttgcgctccaggtggatgaaggggccttccccgtcaatgggcagggaaggggccagcttcaccacgcccgtgaccatgagtggggccacttcccccgcgccgcgggccatggccagaatgaggccggtcatgacgcccggcagggcgctgggaaggatgatgcgcttgatcatctgccatttggaggctccgcaggccagggccgcctcccgcagcccgcgggggacggcggagagggcttcctccgtggagacgatgacgacgggcagcgtcatcagggccagcgtgagggaggcccacaggatgccggaggtgccgaaggtgggcgtgttgtccacggccagctttttccagtagaagagttcgtcaatcgttccgcccaggtagtagacgaagaagccgaggccgaagacgccgaagacgatggaaggcacgcccgccaggttgttcacgcagatgcgcacggcctgcaccagggctccctgccgggcgtattcccgcaggtagatggcgccgatgacccccacgggcgtgaccagcgcgctcatgagcagggtcatgatgaaggtgccgaagatggcggggaagatgccgccttccgtgttggcctcccgcgggtcatccatgatgaagtggtacaggttgtggaggaagacgccgcatttgccgaagaagcccaggtcgttcggctggtagccgtaaacgattttgtccatgccggtttccttcttctccccgtctcccagggcatacacgagcgtgtcccggccctgctgttccctcagcctgcccgcttctgcggtgtaccgggcgtattccgcgttgagctgctccaccctggcgcggagccggtccagttcccccgccgggtcatccatgcctgtgaggatggggttttccctgggcgtggccgtgcgccgtccgttttcctcccggatgtcataggagcgttcaatggccttgatgtccagcttggcgtccgccagccgggtgttgacggcgccgatgtctttggcgtcaatggccttgatgtcgtcccgcaactccgcttcccggtccagcgcgcggcggaaggccgtcatgaattccggggaggaggccgggacggtttctccggaggccagcttgagctccagcggtttgaccagggcttttcctccctccatgcgttccaggcacaggagcccttttggggtggaggaggcggtgacgttgtgcgcgtccacgtagcggtaggattgcccgtaggcttccttgcttccggtgaagagctggtattcccgcacgtccttcgccatggagccggggagggcggggtccgcgggcatgtggcgcgtctggtccttcgtgatgccggcgtacaggacaaggggtttttccccctgtgaagcgggggcgatcgtcagttcatggacggttttgggccagaaggcctccaggccgttgaagacgatgatgcccagcaggccgaagatcatgatgaggcccagggagagcccgatggaggtgagccagatgttgacttcccccagggggcgtttgggagcgggcggaaggctgaagtcctgtttcatggaagatggagaggaagtctcaaatgacgttgaagcgtttgcggagccgctggcgcacgatttccgccagagtgttcagaatgaaagtcatggagaagagaatgaggccgcccaggaagaggacgcggtagtgggtggagtcctgcgccgcctccggcagttccgtggcgatgttggcggagagggtgcgcatgccgttgaagatgttccagtccatgataggggtgttccccgtggccatcagcacgatcatggtttcccccacggctctgcccagacctatcatcagggcggagaaaatgcccgcggaagccaccggaaggaccacggtgcggaccatctgccagcggctggcccccagcgcctccgaggcggcgataagggaaggggggacgttgctcagggcatcctcggaaatggtgaagatgacggggatgacggcaaagcccatgatgaaccccaccaccagggagttgcgctgttcatagggcatgccgaagccgttgcgccacaggtccgcgaagctggcggcctggaagtcccccacgccccacagtcccatgacgccgcggcagaggctgatgaggggctgttccagccagtagcccaggtattcccagcagaaccaggcgcagagcaggatgacgggagtcatgacgatgtattccacgccgcggctgaatttgttgcgccaggccgcgggccgcgtggtccagaaccacgcgatcagggccgccaggccgggaatgaggacggccatgcagagcagggcgggcaccttgtcctccattctgggggccaggtagagcgcgccgaagaagcccagcaccacggagggcagggacgccatgatttccatgacgggttttaccacccgcttgacggagggggccatgaagtgggccgtgtaaatggcggccatgaccgctaccggaacggcgaagacgagggcgtacagggtgcctttcagcgtgccgaagaccaggggcatcagggagagcttggattcgtagtcgtccgtgccgcccacggattgccagagccatttgggggagtcatacccttcataccagattttcccggccagggctttggaccctgcttccgggtgcctgtcttccatggagaagaagtggacctttcccccggcgtccacggcaatggcggagttgaattccgtgctggccgccagctggacgggggtgaattccagcgggtcgctgctccagcggacgtcagccgtggttccgtagcagagcctgagctcacgcggggtggagaccaggaaggaacggttgatgccggaggcggcgtaatgctgcaccgggccgtccaggggggggaactgcctggtctgcccgaagaggcgcacggcggggccgtccgggcgggggtggggatacaggctgaaaattttaaggcttcccttgtcgccgcctatcaccagggacatgtctccgaagagccagttgacggaggtcattttttctccgcttcccaggggggacggaatggtttgccgcttgacccacgtttcccggtcttcatcataggagaagtagaggagtttgtccgtgtccgtagcgatgacgaggctgtctccggaggcgccgggcagcagggcggcggggcggccttcaagctggtccgtcagatcatggaagccggagggggccagctccccttcatggagcagggagcgggattcctccagcgtcatcagcaggaggcgcggaccctgttccgtctccgcggtcgcggtgaagattttccgttcccccgcgtccgcgtaggctatgcgggatattctgccgggaacggagccgctttccgtcaaggggtagagcgggctggtttccgttccggccttgtccgggccgtgcgcgttcgcctggccgtggatgttgagtccggaatggacggagataaggcctgccttgccggattccgtggcgatggcgtaggccgccagggatgaatcataggaatgggcgcagacggtttccccgtccggcagggatacgggagcggggttgaggttcccggttgccttgtccagaaagaagacgtttttgccgttgtcatagacgaaggggaacgtgccggaagggtccaggccccaggtcccctggaccggggcggacggggaaaggtgctgccgttcttccacgtccgcgccctggaagaggggaatggtgacggccagcaggaaaaagaggatgccgaaaacggctacaatgacggtaaagcccccgccgatgatggttttagtcatgatgcggtcaaaccacagcgtggtttttgccacctggaagcgttccggaacgggcttgggcttcttggggggcgcgggagaagggactttggcgctcatgacggcaggcggtggagaggggagttgggggcaggactccggcgggaaggccgcagtcctgccccggcatgtgttgatggcgtatggaaggggtgtttattcaatgctcttgaggacatccgcgctgaccttggcgggaatcgggtaatagccgtccttggtcacgatttcctggccgtccttggagacgatgaacttgatgaattccctggtcagggtgtccaggggttcgccgggcttcttgttgacgtaaatcagcaggtagcgggagagcgggtatttgccgctgatgcagttgtcataggagggctgcacggccacctggccgcctttttccgccagggagagggttttcacgccggaggtgacgtatccgatgccggaatagccgatcccctgttcgtcggagctgatgccctgcacgacggcggaggagccgggctgttccttcacggagtttttgtagtcccccttcttcagggcgatttccttcacgaagccgttcgtgccggaggcgctgttacggccgtagatggagatggcttttcccttcatggaggggacgcccgcatcgccccagtcggagatgttggagcccccgcgcttgaaggtggaggagaagatggagtcaatctgcgacagggaaagggcctggatgggattgttcttgttgacgaagaaggccacggcgtccagggccaccttgatttccgtcggcttgtagccgtatttggcttcaaaggccgctatttcctcccgcttcatctggcggctcatgggggcgagctgggccgtccctgccgtgagggcggggggagccgtggaagaacctttgccttcaacgcctattttgacgctggggtacttcttgctgaatccttccgcccaaagggtcatcaggttgttcagcgtatcggaaccgacggcgctcaggttgccggaaacgccgctggtgggcgcatacggcttgatgctgctgtcaacggttactttctcggcggccatgctcagggagctgagagcggctgcgatggtcaggattttggcgacaaatttcatggcgtcttttctgttgtgttgcgtcttccgtttcccggacggtagcgccgttcatgccggaagacggggaagtgataccctcccgcccccatggtgaggaagagaaacctggttaagaaatcgtcacaaactgcaaggatgtggttgtgggggctgtctttgggggagataggggagataggggagataggggagataggggagataggggagataggggagataggggtgataggggtgatagggaaggccccattacccctataaaccttataacccctatctttctttccctccctccccggagcataaaaagagccgctccccgtggatgggaagcggcgctggccgggaagaagaaaaaaactctctctctcttttattacacctcctcgggagacagccagcggaaggagacgatgttgaacttcctcccgaacgccttgttcaccgcgctcagctccgtctcctccagcgctccgctcttcatgttgatcttcttgaccggcgtctccgggctgtccaccgggtccacgtagttgatccccctctgcaccaccgcctcgcaccacgcccgcgacagcaccacaccctcgcggttggtcagctccccgtaggcccggatcgtaaacgtgtcgtcgcgcgtcgttaaaatattgcccagcaccgccagcacgtcggactggatcaggtagccgggggccgccgtatacaccgaccccttggccgcgtcctggttcgggtaccctcccttgggcgtgatgaccatgtcggagagttcgtcaaaggtgctgttgatggagctttcgtcgatggccgcctgaagcgcccccttcacccccatctccccgctctgcaggcggcggttgacgaagtcggacatgttcaggaaggggcccctcttcttgacctcctggaccatgttccgggccagggacttgatctgcgagtcgctgagcgttctgaggtcggaccacgccatggcctccccgtccgggatgccctgggttacgcccaccgagccgtagtcgtccacgtgggacttgtcgctgctggccaccccgaagcgggagaaggccgtctggctgttgttgagcacggagggggttccgctccgggagtagaggagcttgcgctttttgagcccaagcagggtggcttcccaggcgcgctgggaggtggagttgacgttgaagcccccggccacggtgaggtacttggaggcgtgcttgtagccttcgtcggtcttggagagttcttcgacgacggcctcggagggcttgccctggaggtcgggcacgaagcgcctgttggcaatgccggcggccttgttggaggaggcgtccgtggagaaggcctgttgaagcacggttttaagttcctccctgcccgtgcctccgatgctggaggggcgcgcggccagggaggaggcgaaccaggagtcccagagggcgtcgttgaccatcaggccgtggtcccagaagtcgcccagggaggcgtctcccatgatttcattgtgggagaagaccttgtcgggcgggagcatggggtcggcaaaagcgttgccgatccccacgcccggcacgccggactggtaggcgaagcgcttggcgacggccgccttggagtcgctcctgtaccatcccggggtgaggcggcagcctgcgaagccggcgaggctggagggctgctggaaggggagttccgcggccacgatcttgttgacctgctcggcgcccggtccgccgaagggggagagcctggtgccgtcgttggagaggatgttggagatggtgatggggaagaagtcgctgttggcgtttttgacttcaaactggtaggggctgtagaggcgtccgagctcggaggcggtgggcatctgcccaccccagaagagagggctggagtgctgccatgtcttggcgcggtagtccttgccttccgggtaggctccgatcaccggaggcttgccccatttgaccgatactccgtagtaggccacgaaggtggaatcctgggccgcactgccgtatttgccgcggcgtttcaggttgtcgtccggtccttcattgtccaggaacatgtccgcaggcagtttgacctggtcaagcaggggtttttcccacgcgccccagttcaggttcagaatagagggcatggctttggagaaaacattcatgtctgctccggtgtttgcggttaaattccctgctttgccaatttgcttgggatccatgatgccggaaaccatgacgatggaaccgagtttgttggaactggaggaaaattcgtctgtatacttggtgcagagaacaacgctgttaggcgtgtaattgagatcgtccagcgtttccgcaaatttgatggacatcatggccgttcccctgtcttcataaccgctgccggaaagatactggtactgaatgccgtcagcctggttgatagcataggaactgacctgtccggggctctggtcccagccttccttgaaagcaaagttgtccacgcgcacatcgttcttgtttgccttggattgcgtgaccatgttgccgtgttcgatccgttcgacgacgggatgggcgaaaatgacgatttcgcccgctttgagcgtggaaggctccccggcttttcctacccctcccgaggttaattgcgacgttttccggaaggaggctccaaagtcggcaatctggcggttgttatagccgtcgttgggggaatacggggaaaagggtgattctgaataggtggccgtagagggatcccagttttcgatcagattgccttgcatgcggccataattattggtctgcatgagcggcatgtagcggtgctctccgaagaaagagccccagggaccgccttccgctccctggaatttcatgtccacgttatacgggttccaccagacatacaccgggatcacggaaacgcgcacgtcaatatggcctccgcgggctccgtgctgggcctcgcgtttgacgtactgaatccctacgaaggagtagaagcgcagcaggatgggatggcgcatgtacgtgtagcggttgtccatcatttccatgtttgcggcggcatcagccgcaatcaatgtgctgggggagcggccgtcccattgcagggcggcggaagaatcttgtccgtccctcttcgtggaggagtcccacacgttggcccacaggtagagctggttccaggaaccgatcgggcggttctgctcggttgggctgccgtcctctgacgtgtacgggcggaggccgatatcagaggtgtctccacggaaatcttcaggcagtttttcctgtgaaaacatgatgttcaggtcttttttcaatccaccgaatttagaatccgtttacttttaattgactataaaactaaatgagtgtgaatgcaaaaacacgtttggtcttttctttttagagatacgtttttacttgcaaaacgagaactatttttcttgcccggaaagaactattttgtatgttgatatgacgtgccggaaaacctattggcagcagctttgcgtctcccagtttttataatagattttaataattttcaggaaaattacgatgaaaagaacaattccgcaaacccaaagatttaaacatataagcaagggttttgccctgattgccaccatcaccctgatgatgctcctggccctcctcagcgttggccttcttaccattgcatcctcacaggtccgcatttccgaaaaacagctctttgccgcggaggccaaatccctcgccaggttttccctggaagtggccctcgggcagctccagtgtgagctgggacccgaccagcgcgtttccgccaactcgggcatcctttcctccggcgccagcgaaggcaacgccccgtacatcctgggcgtctggaacagctgggacacctggctcaacaagactaactcccagggcatgaacatttcttccacctacgatacgggaagaaagtccatgttccgccgctggctcatttccgacccggacctgcgcaggctcagcacgctggaagcgggcaaaagcctgctgggcaaacgttcccttaccaaccagaatttccgcagtgtcgccttggtggaccatggcacggtgggaacgcccgtaggcgccaagaaccaggacaaaaaggaaatctacgcccgcatggtgcgtgtggacgattcatccaaaaccattggccttaaaagaaattccagcgtgcgtaaatacattgcgtggtgggtaacgggagaaaaccagaaggcgcgcatcaacctgatgccgcatgcctcggaagaaagcacggatgccctgacggtgatgcgctccacgtgggacacgcccggtcccgatttggagcccctcaacctttcttccatgatggcatcgagttccggaaacgacatgtccacagtcagaaaactcatctcccttgatacgatactggctaacagtaaaaacggccggctgaaagacttgggagaggtgtaccatgacatctccctggtttcttccagtctcttgacggattctaaatccgctgcgtgtttttctttttctcaaaaagccaggttaagaaattgtcacaaacccgtagtagacctggagcttcgtttttgggataccatgcggtcaacggcgcaggacgcgccatttgaccgaacatgactccgcatccagccgccgccgaccagaccgccgtagaggtggattccctggatttttgttatgggagcaagcaatccctgttccatgtcaccatgaaggttcccaggaaccgggtgacggcgttcatcggcccttccggatgtggaaagtccacgctgctgcgctgcatcaaccggatgaatgaccgcattccggaggcccgcgtcacgggcggctccatccgcattgacggggtggacgtgacttccccgtccctggaccccatccatttgcgccgggaggtggggatggttttccagaagtccaatcccttcccgatgaccatttatgagaacgtttcctacggattgaagctggcgggggtaaggaaccgcggcattctggatgaagcggtggaggaaagcctgaggcatgccgccttatgggatgaagtgaaggaccgcctgcatgcttccgccaacggcctttccgggggacagcagcagcgcctgtgcatcgcccgttccattgccgtgaagcctcgcatcctgctgatggacgaaccttgttccgccctggaccccattgccacggtacgggtggaagagctgatgcaccggctcaaggaggagttcaccatcatcgtagttacccacaacatgcagcaggccacccgcgtttccgacctgaccggttttttcatgctgggaaggctggtggagtttgattccacggagaagattttttccaatccttccatgaaagaaacggaggattatatcacgggaagattcagttaacagagagttgtttatggttttttcaaagtttacttccagaaagggagccgggcatttttccctttcctccggcgttgtacggaggctggccgcatcctccgccaaaaggaacagcctgcgccgccagcacattttttaccatgccggcaaaagcgccgccagtcatcaagccaatattcctaatcatgaatcacgacgcgcacaccctgagggagtttgacgccgccctttcctccctgaatacgcatttgctccagatggcctacaaggcgcagagcgcccttgacctggctgccgccgggctgctgcagcagaatgaatccgcctccaaccaggccattgcggaggatgaggagctggatgagctggaaatgacggtggaccgggaaggcctgcatctgctggcttttttcagtcccgtagcctccgatctcaaggtggtgctggcttccatacgcatgtcttccatgtatgaacggatcggggatgaggccgtgacgatcgccaagagggccaacaagcttaacaagcgcccccgcatccgggaggctgcccaggcggaccccgtttaccgggagatggcggagcagttcagagcggtgaacaaggccgtctcctcctgggacgggaaggctctggcggagctggttcccgcgctggagacgctggcggagcatgcggcggccatgacggatacgttcacgcgcctgccggaacagtatcaggacaatctgatttccgtggcggacctgatttttgtgggccgttccatggaacgcatggcggaaggcctgcaaaaggtggtggcggaagccctttatgcggcgtcttgacagcgcacgcctgaaaagctgaaagacggggttccggagtttggcgcgccggaacatttcctgcctttcccgcgcaggggactgcggatatgccttttacctgacggtccaggtgatattgcgcgtggctgactggccgggacgcaggatgacgctggggaagtggggcgtgttgacggcattggggaagccctgggcttccagcgcgattccctggcgcgcctggggcaggtattccccggtatacacctggaggccgggcgcgtccgtcgccacgatcaggcggtggcgggattccgggtccagaaggatggcggcgattttgtcgccgggttcggaatccagcacgtagttgtggtccagtccggcggcggtgtccggatgggcggcggagttgcgttctcccagcagggctgccttccgcaggtcaaagtccgttccttccacgggaaggatgcggccgtccggaatgttggtggcgtccaccggggtgtaggcggaagcccgcacctccagcgtcatggagtcaatggtgggcttgccggaaaggttccagtaggcgtggttggtgaggttgacgatggtggccgcgtccgcgtacgcttccagccggaggtggagggtttcttccaccacggtataggtggctaccacttccagattgccgggatagttttcctccccgtctgcggagtgcagggtaagcaccagcgtgttgcgcgtggcttcctgcacctgccagattttgctgtcgaagccctgcacgcctccgtgcaggtggttggggccgttgttgacggccacggaatgggagtctccgtcaatggagaacctgccttttgcgatgcgattcgcgacacggccgcaaatcgcaccgcaataacaggtgtctttcagcatgtcttcaaagtgcttgggccctacgatcatgtccatgccgtccttgacgacggagatgatgcgccccccgtagttgctgatgcgtaccgtcagcttgtcggaagacagttcaaacagttctactggagcgccgccgggtaaggtgccgaagatcatgccggtatgtagctggtcagtgaaggagggccaattagtaggccagcacgcgggaaccgttgttgccgatgatcacgcgcacgcgctgtccgacctggatcgggttgttcctgctggcgacctgcacgaccgtgtagttgcgggtgccgttccttttctggtccaggcgcacggtgatgcgttccccggtcgtgttgttcacggccttgtcaatctggttgccggcgatgccgcccagaatggcgccgcccgctgccgtggcgtacttggcgttgccgccgccgaacatggcgccggtcaggccgcccgccactgcaccgatgccggtgccggtattggcgttattggcctggattttgacgttttccacactggtgaccgtaccggtataggtttcctgtgcgccgccgatttcgttcaggttgtaggcgttcggggaaccgaagttggtgcaggaggtgatggacagcgcgatggccgcacagccgatggtaagaatggaagtcgttttcatgatgacaatttataaaatgggttgaaggttcaaatcaagtaatttcatggtcaacgggacggacggttttacgcccacccggtggagaaaatccttgccgaaagggttcggcaagggttcgcgttcattgtgatggtttccgtgaggttaggccttgggagcttcttcctttttggagcagtcgcagggcttttcacctttgctgcagggcttgtcgcattttttgccgcacttgccttccttgtcgcatttcttgtcgcactttttgtctttcttgcagcacttctgagcagcgggggcggaggaatcggccggagcggcggcttcctgggcgtaaccgttgacactgaatgcgaaagcaaaggctgctacagcgaggatctttttcatatgatgatgtgtgaggttggtgttgttgatgataaacggcacataatctgccgttctacgactgatagagtaacagagtttaagatttgttcaaaaaaatgtgcagtcagcatgttttttttaggaaggttttcgattcaactgcgttttttaaaaccggggtaagtctgacagtgccgcggcgtggacggagcggcggcttgcatggcctgccgtcttaaggcacgctaagaaacatgagttcagccaaggagcctgtgacgcgccgtttcggaaacggtttgacggttttgatcaaggaggacaagtcccatcccgtagtgtcccttcagtactgggtgggcaccgggtccatgaatgagggccactggcaggggagcggcctttcccatttgctggaacacctggtgttcaagggaacggagcattattccgggcaggacctggcccgcaaggtccaggaacgcggcggccactggaatgcctataccagcgtgaaccgcactgtgtattatatagacggccctgcggattcctggcagattttcctgaaccttctgacggagctggtgtttttccccacgttcccggaggatgaactggagcgggagaagggggtggtgcgccgggagatggccatgtacgcggacgatcccgattccgtggcttaccagcttctgatgcagacattgtatctcaagcatccgcgccgctggcccgtgctgggggaacccgccgcgtttgactgcctgacgcgccaggacgtgctggattaccatgccagccgctatgttccgaacaatgtggtgctttccatcgcgggagatgtggatgccgcggagattttttcccatctggaactgctggtggaggatttaaagtcccgccccctgaaccgggagcttattccccatgaaccgcaccagttcggttcccgcagggtgcgcaaggaatttgccgtgccttattccaaactgaaccttgcctggcgcctgccctgttcaggccatccggatacgccggctctttccgccctggccagcatcctgggcgggggccgttccgcgcgtttttatgaaaagttccacgaccgcctggggctggtgtacagcattgaggtgcattccaaccagtccgagactgacgaaggggcgttcaccatcagcattgacgtggaccgcgcccagcgtgacaaggtgcgggacctggtgctccaggaactgcggaatctggcacaggaggattttacggaggatttgaagagagtttgcaagcagacgcgggtcagccgcctgcgccgcaggagttccgccgccggagtggcctcggaaatgggggcggactggttcggggcgcgcaatttgaacctgtcttcagaatggcaggaagccattgaacgggtgaccacggaagacctgcaccgcgtgtgctccacctggctgtcctccccgaatgtgacggaagtcagcctggatcccgtgggcagcaacgccgcggaggaagacggttccgccgccgggacggaaacggccctgagcgagcatgtgcttggcaacggcatgaaggtggtgattcgtgaggaccaccgccttccgctggcctatgcctgcctggccttcaaggccggctgccgtgcggagaatgaacatgacgccggggtgacggatttgatgtccgaatgcctgctgaaagggaccgccacgcgttctgcaggggacatagcgcgttttctggaggacatcggaggggccatcaatacctccacaggcaacaattccctgagcgtgggctgccagattctggcggaagacctggattccggactggagctgatggcggatgtggtgatgaatccctccttcccggaggacgccttcctccgggagaaggagtcctttgtggcagatgcggaggaggatttggaagatccgctttccgtggcgttccggcaggaacggaaggtggcctacggccatgtttcctacgggaattccccgtccggcacgccggagagcctttcttcactgacagtgcgggacgtgaaggaacagtatgaacgcatcatctgcgcctccaatgccgtgatatgcatttccggagatgtcaggaaggaggaggttctccctcttctggaaaagcgtcttggcggaatgagggccggaatgccgccggtcctgactcccacgcccgcgctgcgcgctggccgggaggtgtccgtgctggacaagcagcaagccgtgctggtggtgggaatgccgtgcgtggacgtggcttccccggaaatggcgcaggcgctgctgttccaggcctggtgcagtgacatggccggtcccgttttcaccaacatccgggaggaagccgggctggcctactatgccagctcctccctgttcatcggcatggacgccggaggcatctgcttctacctgggcacctctccggaacaactggaggaagccgggcggcggctggaaaagactctggagatgattcatgagcgcggcatgacggaagaggagctggaacgcaccaaggcgtccgccctttcctcccgcctgctggccatgcagtccaacggagccctgtgccagatgctggctctggatatcctgttcgggctgcccctggatgcgtttgaacggcagacagtcgccatcaggaacatggagctggaccaggtgaacgcctttatcaagaaggtgctggaccccgcgcagccgcgttcctggtccatcgtgcgtccgcccctttcctgaggaagcgggataacggagcggcttttgctccacctcccgttttttgccctgttggcggccaggttccaccgggggcctggcctgcctgccgcaaaagtgggaatcggcgttccgcccgggaatgagggccttccggtcctcatcaagtgcggctgcgggagaaagggaagaaagcccagctttgcttcggacggacgtaaatgcgaaaggcgggagccttccgctcccggatgggagttttccgtctttaccggtttttcaagcggagtattcctctttttctgccgggctgccctgccaccgggcgtaaaaaagccgttccctcgcgcaggaaggaacggcttgatgaaaaaatgaggttcgcggttttaaccgatttccgtgcggcccagcaggtgggcgccttcttccatggcgaggctgcgggtcttcatgtccccgacgacgcgggcctgctgcttgagttcgcagcggtcggaggtgaccttgccttctacgttgccgtagatgcgcacgtctccggcggtgatgtcgcccttgatctgggcggtttctccgatggtgacttttcccttgtcggaaatgatttcaccttcgattttgccgtcgatgtgcatgtcgttctggaaacggatggttcccttgatttcaatgccggaggcgaggaagtttgttacgttgtctgtcattgtcgtaaaatggttggggatggatggttctggctcagatggtcatgatgtccttttccttgacggccaccagctcgtcaatgtccttcacgtacttgtccgtgagcttctggatctgcgtttccagatcgcgctggccgtcttccgtgacgatgttgtccgccttgagctttttggcggagtccatgccggccttgcgggcgccgcgtacgcgcacgcgggcttcttccgcctgggatttgacaagcttcacgaggtccttgcggcgttcttccgtgagggcgggaatgggcaggcggatggagcggccttccaccagcgggttgaggttcaacttgctttcattgatggcgcggccgatgtcatggacggtgctcgggtcaaagggctggatgaggatgaggcggggttccggcgtgctgatgacggccaggcccttcagcttcatgacggagccgtagctggagacgtgcacgtccaggttttcaacgaggccgggggaggcttttcccgtgcgtacgccggagaattcctgtttggcgaagtccacggccttgagcatggattcctccgtttccaatattaatgtttctgcgtccatgattgtggtgggtgctaagtgttttttgtaggttggaaaaaggggcgtgcggagttcagctgatggtggtgccgatgggttccccgagcagggcgcgcgtgatgttgcccggcgtgtgcatgtcgaatacgatgatgggcttcttgttgtccatgcacagggtgaaggccgtggagtccatcaccttgagctggcgttccaggcattcctggtaggaaatggcgtcaaagcgcttggcgtcggaaaccttcttggggtccgcatcataaacgccgtccacggaggtggccttcatgaccacttccgcattgatctcgctggcgcgcagggccgccgtagtgtctgtggaaaagaacggattgccggtgccggcggcgaagatgacgattttattgttgtccaggtaggtgcgggctttcaggcggatgaaggattccgccacgtttttcatttcaatggcagactgcaccacgcaggggactcccgcgcgttccagcgcgctttggagagccagggcgttcatcaccgtggcgagcatgcctacgtagtccgccgtggcgcggtccatgccgcgcacgctggctttagccccgcgccagaagttgccgccgcccacgaccaggccgatctgcacgccggcgcggtgcgcctgggcgatttcttcagcaatgcgggcgacgatttccggggaaatgttgtccatgctgccggggctgcgcagggcttctccgctgagtttcaggaggattctttgataggcgggtgcggatgtgtcagacatagatgcggattttacgcagacaagattgaaatttcacggggcaaaaagaaagcaaaaagagagcacctactgatttttctccgccgtgccggagatttccacctggatggggcttctgctctccagactgcgggtggggaaggggaaggaaatgccctctgccgcaaagcggtgcttgatgtcgtgggcaagcgttttctggcagtccagaaagttgtccttcaggcaccaggcgccgattttgaatcccagggaggaatcctggaatccggtgaacatgatgacgggagccgggtcgtccaggcagagcttgttctgtttgaccacttcctgcaatatgctcacgacgtgttcaatgtcgcaattgtagtccacgcccaggtccaggtcacagcggcgcgtggaaaagcgggtgatgttgctcaccgggtttttgatgatcatttcattgggtatgcggaccatggtgttgttcggcagccggagctggacggacatgaggttgatggagtccacattgccggtgatgccgcccacttcaatcatgtcccccaggttgatttgcttttcccccaccaggaagaggccgctgatgatgttggacagggaggtctgggaggcgaagccgaccgccacgccgatgatgctggccgcgcccagcagggtgaggatgtcgaaccccatcagggcgaaggcttccacgccgatgatgatgtagcctgcctccttgactattttaacggtcaggcgggacgcctggggggacattttcagggcggtgattttccggagcacctggcagagcagcttcaggagaatccagctgaccaccagccatatcaccacatgcaggattttggcgcccacggactgcaccatctccagcttgagccagtccggcatgttcagaaaatccatggttcttgtccagatatcttccctggaggatgcggctgccatgaaatccatattcatgccaaggatgtagcaaacacccctgtgcggctcaaggggcgtgcgcgtattcctcctgatttatgacagttccggcatttccggaaagggagaggccgcggccggggaggggggatagccgggaatgtgcgccttaaagggccgtcaggtaccggatacgcgcgtcaagatagagaaaaagcgggagggcctgttcggaatgaggtacacttttcctccggcggaaaagaaaatgacttccatgcccttttccgtcccccggtccacacgagccattttccattcccctgcaggactggcggacgtataaaccagataaaatttcagggaaccgtccgggcctttcttggccgcttttgatttattggaaaagtcatacagctctcccgcctggttcttccagattccgtttaacagctggtccaccggtctgccctcggaattgaatggcttcatgtaattgtggatggcgatcgcttcctccatgcttccctgctgggccagctgcttctgccttttttccacggcggccagatatttccgggttaacggctggcacgccttggagtattccgtcaggaattcctgatgcaggttgttcaatcccggctccggtgatttgatgatgttttgcctgccgtcttgcagggtgagccagtcagtactggagtccttgtaaatctgaatgatggtggagtcgtcttttttaacccagatgcgcaggggctccccggtgaagaccactatttcccgggaggattttccggggtccgcccactggtcctggggctggaatgctgtttgtttaatgtcttttgagaaccgcctcagtccggcatccagaaactgcgtgaattcgttgctgtccccgttctttttccacgcctttcctatgaagaacgggtcgatggtgttggaagaaggcggagagagaatatcttttttgatgttttgaagaacggattgtatctgtttggctttttcaaagtcggattgattgaccgcctgctgctggagggcgagaagtttttttgaaaatgcgggaagaagagcttccccgcgcctggtgcagaatttttgataggctgtttcaaggtccctgatgttttcaggcgcttgggcatttgcggcccagacggagcctgcaagggcagaaatcaacaggaaagccggcatgaagtagttcattccgggtaaattagaacggaaggatccgttgtcaatacttatatgttagagaaaagcggcaaaaaggccgttccccggaaaagggaacggccttgaaatattgtcggggcagcttacttgctgaggtaggaggccacgccttcgtgggacggggtcatggccgcttcacccttgtgccagccaagggggcagacttctccgtacagttcgaagtgctggagggcgtctaccacgcggatggcttcatcaatggagcgtcccagcgggaagtcgttgatgagctggtggcggacgatgccgtccttgtcaatcaggaagaggccgcggtaggcgatcagttccccgttgacttccacgttgccgtcttcgtcaatttcctcgtctccggccagaacgccgtagtcggcggaaatggtcttgttgatgtcggaaacgatggggtagctcacgccctggatgccgccctggtcacggggggtgttcacccaggcccagtgggagaattcgctgtccgtggagcagcctacgacggctacgtcacgcttgtcgaattcgcccagggcttcctggaagccgatcaattcagtggggcacacaaacgtgaagtccttcgggtagaagaacaggatcacgtactttttgcctttgaactggtcaagactgaaatccggtacgatggtaccgtttacaactgcgtttgcactgaaatgaggtgccggttttcctatgaggagcatggtcggttttttggtttggttctaaaagaatgattccaaaaaacgaacgaaagtcaagtggcaatgatgccttctctgtggcaaaagggcctgttttctcttgaaaatgaagctttttttgtcagtattgcctgcatgtcatcctcaaaggcgcaacaagacgagtggtccggcaaaattggcgtgattcttgctgtggccgggagcgccgtggggctgggcaactttctgcgttttccggggctggcggcccagtacggcgggggcgccttcatggtggcgtacggtctcatgctggtgctggtgggcgtgcccgtggcatgggcggagtggtccatcgggcggcgcggcggccagatgggagcccactgcgcccccggcgtattctggtacctgaccaaggggtccaggctgtggaagttcctgggggtgctcgcggttctgggcccttcctccgtggccttttactacatggtggtggaggcgtggtgctgcggctatttctggaagatgctgacccagccggaggtatttgccacggctgagggaacggcgcagacctttttcagtttcacggggatgtacggggacgggagcgccctgctgtccgacaacgggctgctctggatcgtcggcggggtcatcctgctgaacctgggaatcatttaccggggcatcagcaagggaatcgagatgttttcacgctggttcatgccgatactcctgctgatttccctggtgctgctggtgcgcattttgtgcatcggcacgccggacccatcctatccggaccgcagcattgagcaggggctggggtatatgtggaatcccagcaaggtgttggtggaggagcaggaccgggacagcggggagtggaagacggtttccatggtgtccgcctcccaccggggggccatggatgaagccgtgcggcaggtggaaatgtccggcggaacccgcaggctgaccgaggtgacgttgtgggacggcctgaaaaacattgaactttggatagcggcggccgggcaggtgttcctgagcctttccgtagggacggggctgatcctgacttatgcgagctacgtcaggaagaaggaggacatcgcattgagcggcctttccgcggccgcctccaacgaggtgtgcgaggtgggcattgccggcatgatgacggtgcctgccgccgtggcgttcctgggggtggccggagccgccgggcagggaacttttgcgctggggttcatggtgcttccgcaggcctttgccaagatgggctccagcgtgatcttcggcagcctgtttttcctgctcctgaccgtggcggcggttaccagctccatttccatgatgcaggtgggcctgtcctttattgaagagttcatggggttgaaacgcaagatggccgtggtggtgcagggttttttcacggccacgggcacgctgatcgtcgcctggtacagcggcaacctgctggcgatggatacgtatgatttcttcctgggcaccctgtgtttctttgtaagcgccatggtgatgatgattctgttctcctggaagctgggagtggaccgggggctgatggatctggaagacggttccgtcatccgcattcccagaatctaccgcttcatcatgaagttcgtgacgcccacgctgctgctggcgattttcctgacctggctggcccagaacatctgggtgaagcaggccgcccccattgaagcgctgggacgcggggagcatggcgcggttattccgatgggctttctggcggcctacaccctgttcctgctctttatcaccatggcgtccggaaggcacaaggtgtaccacggcccgcggtaggcgggggaaaaccggcgcggatgtccgtttatccgtggcttgcggcagccggaggtccaatccggaggcttgaccgccgccggatttgatatagtctgttaccatgtccagaatgaggaggatacgcaggaaaaagccccgtgccggaggcatttggaaaaagctgctgctgtggggcgtgctgggggctctggtgctggctgtggcggcggtagccggctcctacctgtatgtcaggtcctatttgaagagtgacgattttttaaccatgctggggcagtccgccgttgacgacatgaatgtggatgccgccaggatagccccgctggactgggacggttccggcatccggtgcgacggcgtgacgatggaagggcatgagtttttaacctccctccaggcaaaaaacattgaaacggagttcagccgctgggatttgctgaagcgcgcctttgtgattacctccgtgaatattgcggagctgaagcttcaactggccccggcgcccttccgtttccgggaaaaggaagagggacccaggagctgggtggaaaagaatatcctgccggatacgttccgcctggaaaaggggagcattgattccctgtccgtctcctacggtgttcccggcaggctgtacgccctgaacggaacccgtgtggagagtacccatgatgccgggtccagccagtacaagtttgacgtgcaggggggcaggctgctccttcccttcaagggctgtccggagttttccctgatgtccggcacggcgcagttcaaccattccagcaggcgggtgaacgttccctcctgtcgcctgaccacggatgccggcggctatgtggacatcaagggggactgggacggcctttcctcctcctggacggcgaatatggtggtgaacagcgttcccgcctcttccatcctggaaaatgactggaagaagcatgtccagggcagtgtgagcggcggggtggacctgcgcggcggccgggacggcgtgacgcatgtggccgggctggtaagattgcaggacgggatgctgaccgggcttcccgtcctggacaggctggctctcttctgcggttcttccagattccgccagctccccctgcacaaggcgtccgcccagttccgctataaggaagccgcctggcatgtctccgacattctggtggagagcgaaaatctggtgagggtggaaggctggctggaaatcggaaaaggaggcgagcttaacggaaggttgcaggtgggcctgcggtccgacggcctgtggagcgccctgccgggcttttccgacgtgttttccgcttcccgccagggagccggaggcaatctggtgtgggccaatgtgaacattggcggcacgctggacaacccgtcggaagacttgtccgcgcggcttatcaaggcggcgggagaccgcctgacggagatcggcatgggcaaggtggcggaagtggcggacgtcgcgtcgcgcctgctgaacaagggggccggggaaggcagggggaaggatggcacggaaaagggtaacggggggttcaggattccggccgcagaccaggttcccgctcccgtcatgccccagcttcaggacgccgcagagaaggggctcaagaccgggagcgacctgatgaacggattgatgaatttgtaacctgatttttccagatgaaactttatccctaccagacggtgcaggcagtggccgttattgcggagcgcatcgcggatacggctttccgcgccaccctgccgaacggcaagactactgtggcttttgtggagaaaaagaacgctccgttaagagatgtgctcaagccgggcgaccgggtgaacgtgacgatttgcccggcggattttgaccgcgcccgcgtggacggcctggcggaatgacgggggattgaggttccaacggcatatttcaagctgttttcattcccctcctcatatttgggaacgtggactttttggcacacggcaggggtacgtttgtgcagatccattttatttgcgggatggattctgccatgcgggctccgtggcccctccctccggatttttattctgtttttagccgttatggcattttcatgtggaaaggcatatccattttcccaccgttttaaagcgtctgaggatgttgaatacaaagactgaaacagcaaagacaagaactggttcaaagaatttcaggatggagtgcagcgtgctgttttcaatgctggcgggtatgctgtgatagaatagcataatgcctatggggtggaagacatagacgaaaaagacggaaggcgccaggctggatagtttagtagccgtttccggggatagccgggtgcaggctatggcgcataccatggggaaaatgaccatgaagatgttttggacggatatcaatatgagggcgacatgctggctgcctccggcatcctgcatggcgtatttgccaactgcggcgcacagcagcattaccagcgtcaaggatgaaacaagggcaaggtgctcgcaaatccatgcgtgaagacggatgatgcgcttcctgcgcgcgcaaaaaataccaagcaggaaccaggacatgccgtacgctccctgtgctttaaataaaaaggggatgtcatctaaacccgcatggtaaattaattcgggggcagcccccagaatttggaaaatgacggtaaataacaacagtgccgcatcattcaatttacttaacagagggctgacaaggcttaacagcagcagttccctcaagaaccacagtattccgtaggcggggaaggtgttgaagatattacagccgaaaacggcaaccatgttggcatagatggcatgaagattgaatttgaagtagatcaacgctccaatcaggcaccagagaagataaggaatgaacagtttgagaaaacggctgtaattgagcgcctttttactgtcctgcttaataaacaaggctgaaatgaaaaagaaaacgaagacggaccaagcgcctattatattatcgctgaaatagttccatacattggcatgggatgctataatacacagcatggtgagtacccggcaaatgtcaatccagacaatacgcccgtgagatttaatctgctgtatattaatgaattggttgtcagcgatgttgctacatgcgtgactgattgttttcaaagggagtccgggtttgtttttagagcgttttcaaagggccgtcctgccttccagcgctttcatcagcgtcagcgtgtccgcatggctgaggccggcgccggcgggcaggccctgggcggggcgggaaattttgcagtccagttctttgagcaggtggtggaggtaggtggccgtggcttccccctccacgtcggagcccgttgccagaatgacttcacagcccggcagccgggtgacgcgttccaccagggactggatattgaggtcttccggctccacgtcgtccagcggggagagcttgccgcccaggcaatggtacagcccgcggtaggcgctgctgcgctcaatgggaatgacgtccgtggcctgttccaccacgcagatgaggcggctgtcccgttcttcatcccggcaggcggcgcagggttctccggcggtgctgaaaaagccgcagacggggcacggcgtgacgtgttccgccgcctggccgatggtgcgggcaatcgcctccgcttctcccatgtgcccctggagcatccacaaggccatgcgttccgctccgcgggtgccgatgcccggaagctgtttgagggcggttaccagttcaagcacgggaaggggatagtccagattattcatgagtggggggatgttcggaatgatgcgggccgggcgacggctggggccacaggatggcgagcgcacccgcgctccccgcggagagcaggcacggaacggcgttgaagaagatgccccacagccccagcaccggggtaaagcaggccagcagaagaaggaaggcggccagaacggccgttttacggagtgttccgcggatcaggatcaggtcgtaaaccagggccagcgtcagcgcaatgcacagcaggaagcccatgccgggggagagggccggagcatctgcagccagcagaaacggagcggaggccatggctcccttcagggcttgcgcccaggcgggggtgacgcccagggaatacagcaccacgatcaggatgatccccgctacggagaacagggcccaccgcatgagcagaatgtcctggtgcgttttggaaggcatggctgtgaaatgaagaaggcggaagcgcgatggctgcggtggacacaaacatcagcgcttccgccgggaaggggtttcctgaaagggtcaggcgaatctcttcacgatgacggaggagttatgccccccgaaaccgaaggagttgctcaggacggcgtccactttggcctcgcgggccttgttgggcacgcaatccaggtcgcattccgggtcctggttgtccacgttgatggtgggcgggatgatgttttcctgcatggccatgaggcaggctgccagttccacgccgccggcggcgcccagaaggtggccggtcatggatttggtggagctgatgagcagcccgtttttggcgtggtcgccaaagacggccttgatggccttgatttcgcagatgtcccccagcggggtggaggtgccgtgcgtgttgatgtagtcaatgtcctccggcttcatgcctgcgtgttccagggccatctgcatgcagcgtgcggcgccgcggccttccgggtccggagcggtgaggtggtgggcgtctgcggagatgccgtagccgacgagttccccgtaaatcttggcgccgcgtttctgggcatgttccagcgtttccagaatgacgacgccggagccttcgcccatgacgaagccgtcgcggtccacatcatacgggcgggaggcgcgctggggttcgtcattgcgggagctgagggctttcatgttgctgaatccggagacgcccgtaggcaggatggtggcttccgcgccgccgcagaccatgacgtccgcatcgccgaatttcatgatgcgccaggcttccccgatgttgtggttggaggtggcgcaggccgtgacgatggacatgttcgggccgccgaatccgtattccatggagatgaggccggaggcgatgttgctgatcatgtacgggatcatgaagggggacacgcgggccggccccttggaaagaagcgtggcgtgctggctttccagcgtgccgagaccgccgatgccgctgcccaccatgacgcctatgcgggttttgtcctccgcttccagatccattccggagtccttgagagccattccggcggcgcccatggcaaagtgcgtgaagcggtccacgcggcgggcgtccttgggcgtcttgaaatacggggtgggatcgaaatccttgacttcaccggcgattttcgtggagtagtcggtgacatccatggacttgatggtgtcaatgccgctgcggccagccttcatggcttcccaggtggatgcaagatcattgcccaaggggctgatcactccgatgccggtgataacaattctgcggtcggtcataataagtgtgagtggttgcaaataatgcttgagtcagaataggcgacattacaggaaagtcaagctaatcccccccgttccccagtgcggggcgaacggggaatgcggaaggggctttcctgctgggggacaagggctttccggatacgggcgttccctgttccgccgcggcggagccggtcccgcgaacggatttcaggataaattccacaatgggagccgggtccggcaggctgtggggatggtggcctgctcccggtttatggatcacccggatgctgccgcccatggcgcggtatttccgttccactacggccatgttctcctccaggggcaccacgttgtccgcgtcccccaccacggcgagtaccggaatgcgcgcgttggcgagcggcgccagcctgttgacggggctcagctttccgctcagggcttcctgttccgtagcgccgtaaacgtccagcaggcggagccagtcttccggggagcctgttcccttccccctgccgccgggccagctcgccacgtcgcaaacgggggcgtccgcataaatggcggccacccggccgggatgcagggccgcccagttgaaggaaaagaggcctccgcggctgaacccttccagcaccgtttttggggaaaggcggtagtcccggaccaatgtttcataaaaccggtccatgatgtccatggctgcgggcgcgccgtacatgttctgcacgtccacgtaagccacatgaaacccttccttgagcagggctatgtccgcctgcggctcgttcccgaagaattcctgccgccagatccacggcctgttttccgccggggttttggggagaacgagggtggcgttcctgcccgctaccttgaagtgaagggacgggaagccgtgccagtccgagacggccactccctcccggatgcagggaagaacggagaccggaacccccttcgggatgccggggcggcggtggcccgtttccgtcagccacgccagcttgtacaggttgtggcgctccagggctttcctgaactcgtccccttccggaaaacggacgcggacgggcacgcggaggatggaggcgaggggaggccaaatggccctggcaatcatgaagtggccctcctgcccgggatggacgccgtccccggcgtaaatgaagcgggcattccttttcttcgcttcccggatttggcggcccagctccgggcgcatgtccacaaccttccagccgtcctttttacggctggcgagccatgcggcataagtgtccagcacctggttgtaacgggccgcatccttttccggggtatccgccatatagggaggcggcgtgatggcgatgaattgggccccggcgtcttccactctttttttcagccgttccatgccttgttgataggcctggaagcctgattcggaaaagggctgcatcatgccgtcgttcatcccatagcaggcaatgacgagggtgggcgcgtatttggagagaatggaatccaggcggtcatgaaggcacgggcgggggaaggcgcccccggcgtggcccggttccgacaggccggagaccgtttcactggggagcgccatgctgacgatttccgcgtgccggtaggccggagtctgccgcagggccgcttccaccagggcaggccattgtccggaataggggatgctgtcccccaaaatggcgattctgggctccccgcccatggcgtgcgccaggaaaagggccagcaggaccgggatgatgcgcagggtggtcattctcatgataccacattacgcaggcgcgggaatgaatgtttcagaggcgcgtttcttccggaaaatagaattttcccggagcttttatccggttcccggcttttccgtccggtccttttttccgtgccgtgcgcgtcaatgggggctgttcgccatggccggctgcggcgcagcctggaatcccagggaaagggaattgacgcagtagcgcgtgtttttcggcgtcaggcgttctccggtgaagatgtgccccagatgtgctccgcaccgggcgcatgtgatctccgtgcgccgcccctggcctgcgttgatgcttctgacggcgtccggcagggaatcgtcaaagcagggccagccgcatccggcgtcgaatttgtcttccgaccggaacagggcttccccgcacttgcggcagccataggtgccttgttcaaagaagctgacgaactgcccggaaaagggcggttccgttccctggtgctcgatgatgcgcttttccgtttccgtgaggggacggcgcgttcgggatgggccgggatcaggcacgccctgggaggcgggaattccgccgtccacagccatgacgcctgccaccccttccgcaatcgttcctatccatgatgcccagtgtctacgttcttcctgattcatacgtacctatgaccaggttggagcggatttcgctcattcatacaccaatatcttgtggataaggttgattttaaggggagaatactaaaaatatgggagtctgtgggaggattagtactctaaatccagccaaagctgctcccagattccttgccgctgttcttcctgggggtgggagacggacagccccagaaggcggaacgtgcggtccccggaatccaggtcttccatcaaagtccgggccaggggcaggatgtcctccttctccgtcagggaatccggaacggtcatgcagcgggacttctggacgaagtccgggaatttaaccttcagggtaagcgtgttgccccggaagccggagcgcgccaggcgccccgtgagctcttccaccagcaggggaaggtgttgttccagggcctccgccctggtgacgtctgcccggtaggtttcttcacagcccacggatttgcggatgcgggaaggttccacggggcggtcgtccatgccgcgggcgaagttgtagaagatcccccctatcttgccgaaatggcggagcaggaaatccaggctgcgttcccggagctgcgccccgttggtgatggagagggcgcgcatgcgttcggcggtggcgtggccgacgccccagaaggcctcaatggggagccgcgcgatgaattcctccgcgcgggagggatgaatggtgaacaggccgtccggcttgcggtagtcggaagcgatctttgccaggaatttattgtaggaaacgccagcggaagccgtcagatgaagttcctgcctgatttccctcttgatgcgccgtgcaatgtcgacggccagcggaatgcccggcttgttttccgtaacgtccagaaaagcttcatccagggaaaggggttccaccaggtccgtgtaacggtggaagatggagcgtatctgcgctgaaacggatttgtacacgtccatgcggttgcgggtgaaaatcagcttggggcaaagcttcatcgccttcatggaaggcatggcggaacgcacgccgaagcggcgcgcctcatagctggccgccgccaccacgccgcgcatctccggtcttcctacggcgatgggcttgccgcggtactcgggatggtcgcgctgttcgatggatgcgtaaaaggcatccatgtccacatggatgatttttctctgtttcatgggtgcgcttcatgatcccggttaaagcggaaatcatgaggaaaggagcggccgcatcataacgcgatttgcctgccaagtccagttggacagggtaaagaaaggcttgaaaatgaaagaaagggaggtttttggaaaaggcggcgattttgaatgaaacggtttggaggaaggtggttgagcaccggaatttccagaggaaaatggagcgccgtcagactaatagggaaagtatctctttctccggtcgcgccgtgctgaaaggaacttctcttcttcctagtccggagattcgtttttttgccgggaacccgataaaagagggagtggctgcacttgataaggaagcggaaaaatgaagggaacgggctggagggaaaaacagcaggcagtttcccctctgcacggaggaaacggacttgttggcgttggggcatggaaaaggcgaaggacgcggacgcctttgccttttctcttgatggcagtgcgactttcgccatcgtccggaacaagggagattttttaaaaaagatcagaggctctggctgcccacatttttttcttgatcacggggtatttgaggcgaaggtgttatgttcatggcatgaaggaacggcatgctccggatttttttcctaagaaaaaactgccgggcacggaaccagttggagaaatggtgacttcatgataaaaaccgaacatcaggaaacggcgatgaagaggtatttttccggagaggagattgaaataggcgaccatatcaccacggacgggggcgaggatcataacgtgattctgaaaatcatcgattgtcccgcagtcagggacgattatggccttgattgttttggcgccctgatgtgcagctctcaaaccgggggtatcatcttcgtgtcttttgatgaagtttgttcaccagataccaggctgcttcaccggaaaacgagtgatgaccatttgacggcgatatgaggggcatgaatttcttggccggaggaaaggatagtggcccttccttcggaatgggccgggatggcggcgtgttactggagcgccagttccatctggatatccaccctttcataggacgggcggtaaatctccacttccctgaatcccgccttcctgtatagctggatggccgggcggagcagggtattgctttccagaaagatttttttgcagcccagttctttcgccttggcgatgacggtccggcacaacagcatgccgatgcctttgccctgcgcgctggggctgacggcaagtttggccagttcgtactgatgaacgggatcgttcttcctgcacagggcgcatacgccgacaggctcttccctgtaaagcgccacaaagatgtggccgcccttgtccagaatgtgctcctgcgggtggtccagcgcgtgatggtccggttcttccatctgccagtgcgccgtaatccattcttcattgagcgccttgaaagcggcccggtagcggggatcgtagggaatgatggagacatccctgccttcccgttccttttttgcttccttcacccgttccagcagcgttttttccgccagcagcccttcccattcttcaatggcgcgccacaggtcgttccgggtttggcgggaaatttgttccacggcggcttccacgtcgggatattgttccgccatgatatcggacattttctttcccttggcggacagcatgacgaggtttctccgtccgtccgttttgtccttcttttctttcaccagccccctggcgcccatttccttgacaatgttgctgacggacgggtgtgaatgccctatttccctggcaatggaggtgatggtcttggcttccccctctgacaggacaaagaacacgggaaaccatttggggcggatgtccacgccgtacatgcggaagatcagggcggcgtcattcgttattttatccgtcagcatccgcagtctgcttccaatggccatttttcctgtccggttgaagaaatccatattcccgtctcctgttgtattgttaaaaatgtaactgattacgtaattggttatataattattccccaatgtcaaaataatttttttggatgcatgtccgaaaatggcgggaatcatgtccgcggtttgctatcatgagcctcaaccgtggagtttgcaaaaccatgaaaggaaatgaaaaggcctggtatgccgcgtttaaatccaaggatgcccgttttgacggccatttcttcgtgggggtggcgtctacgggcatttactgccgccccatatgccgcgcaaagctgcccagggccgggaattgcacctattacgccacagcggctgaagcggaacgggccggattccggccttgcctgcaatgccgcccggagctggcgcccggaaccgctccggtggacgccgccgcttccctggcgcgccgtgcggccggtttcctggaggagaattgcggagacatggaaagcctggaagagcttgccgcccaccttggctgcaccgggcgacatttgcgccgggcttttgccgcggagttcaatgtttcccccatccagtatttgcagactctccggctgctgctggcgaagaatctcctgacaagcacgaggctttctgttcttgacgttgccatgagcgcggggttcggcagtttgcggcgcttcaatgaattgttcaaaaaggaatacaggctttccccggcggcattgcggaagctggggaaggggggaaaagaggaggagggttccggaataacgctgacgctgccttaccgccctccctaccggtgggagaggctgcttgagttcctcgcgctgcgggccattcccggcgtggaggccgtacgcggcggggagtatggccgcaccgtgcgtcttgcaaccagaagggggaaagatgtctatggctggatacgggtgggccattgccccgtgaaaaatgcgctgatcgtggtgatcgcgaggtctctgcttcccgccttgtcccaggttcttgcaagggtacgccatttgtttgacttgtactgtgacccggccgcggtggatgaaacgctggcttccatgaacggcctgtctccgggactgtatgttccgggaacccgtctgcccggctgttttgacccttacgagctggcggtgcggacagcgctgggacggcaaatttccatgaaagccgcgaatgctctggcggggaggctggcgcggagccatggcgagcccgtgcggacggggatggaggggctgacccatgcgtttcctgcgccggggaagattctttccctgagcggcccgggaagcgccggatgggacattcccggaatgaccgcatccaggggcagggcggttgtcgagctggcgcgcgcgtttgaagaagggagcattgatttcagtttccgggccgatcctgaggctgaaatgaaaaagctggcggggctccccggcatcggaatatgcacggcgcagtatatcgccatgcgggcctttggatggacggatgcctttccttcaaccgatcccggcattagagaggcgctctccccgcgcacgcaaaaggaaattcttgctctggcggaaggctggaggccgtggcgcggctatgctgccgtcaatttatggaattcactgaaacaacactgaaataatagaaagatgatgtattactcaacacactattcgtcaccccttggtccgctcacactggcgagcgatggggaacatctcgcgggcttgtggctggagggccagaagtattttggagataccgtcagcggggacatggaggaaagggacggcctgccggtatttgccgcggcaagagactggctggacaggtattttgcgggcggcaggcctccggtagccgaattgccgctggcccccgtggggggagagttccgccaggccgtatggaagattctctgcgacattccctacggagaggttaccacttacggagagattgcccggaagatggccgcgcgcgggaatagaaggagcatgtctgctcaggcagtaggaggagcggtggggcataaccccatttccatcattatcccgtgccaccgggtggtgggcgcaggcgggagcctgacgggctatgccggcggaattgccgcgaaaatcaggcttctgaagcttgagggagtggacatgtcccgcctttttatgccgaaaaagggcaccgccctttaagggggcagggaatgtcctgcacaggcggaacgttgccgccagacggtgcggaggggtaatcaaacgccgttccgatgtcttgcgatttcaatcaaacaaaaaccgcaagcactgataaacagcaacttgcggtatgaaaagtctggtaggcccggtaggaatcgaacctacatcgtcggtaccggaaaccgatgtcctatccattgaacgacgagcccatgttcccaaggaacgagagagatagaatagaaaaaacgggccggatgcaagtatttttatacgggtgacgggattggcgtgatgaaaatattaaagaccaaagactaatggcaaaagggcgccagaatgttccgggctcgggagagcagagttttccgtcaggagattttatggtggaaggagaagatggctgccagaacggccaccaccgtaacagtcatgatggccgcaaagaggggccagaggtccaggaatccggccccttccaggaagatgcgctggatgagttccagcccatacctcatggggttgagcagggtaaggtcctggaagatgtccggcatgctggagatgggggtggcgaagccggagagcatgaccatgggaaccagcagcaggaaggttcccacaatggcctgctggagggattgggcgaaggaggagatgcacagcccgatggccgccgcggtgatgatgaagagcagaatggccgcggcaagcagccagatggagccctggaaggggatgcggaaccagaacatggccaccagcaccacaaagacggcctgcatggagccggtgatgaccgtggcgatgcctttgcccagcaggatttcccccgggttgtacggggccaccaggagctggtcgaaggtgccttcctcccgttcccgggcgatggagagcgccccggagaggatggagttgatcagggccaggacggcaatgaggccgggcacgatgaaccagcgcgtgatgaggttggggttgaaccaggagcgggcttctatttccaccggggaggcgccgccgtttctggcggtcaggtccgcgccgaagccggaggcgatttgctgggcgtagcccagggcgatggctgccgtgtttgcgttgcgcccgtccgcaatgagctggagggaggcggggcggcccgtctggaggttgcgggagaagtccggaggaatggtgagccctacgacgatttcccggttgtcgatcatgcggtcgatgtccttttccgtggctgccgcggcctgccgccggaagatgccggttccctccaggtccgcgatgtactgggcggccgtttccccgccgtccttgtccagcacgacataaggcacgcgcgtgacgttcatggtggccgcgtatccgaagatgcatatctggatgacgggcgggatgatcagggccatgcggctttttttgtccctgagcacggccagcagttcctttttgacgagggaggctattctgacgaagaagtccatggcgttattcgagggatttgggggctttcagccgggcgatgcccatgaggacgacggcaaagacgcccagcgtgatgcagcacgggatgatgacggaggggatgtcccctgccaggaagagggtctggagcagggtgacgtagtagcgcgccgggatcatgtaggtaagggcgcgcacggcgggcggcatgttcaggatgtcgtacaggaagccggagagcatgagggccggcatgaaggtgcccatgatggcgaactggcaggccaggaactggtttttcgtggcggtggagatgacgagtcccagccccagggccacgatcaggaacagggcggagaccgccagcagcagggtgagggagccgcggatggggatgtcaaagacgaaggcggcgaagatcatggagatggccaggctgaccatgcccagcaggaagttggtggccgccttggcggtgaggatttccccgctgcccacgggggtgacaaagaggctttccagcgtgccccgttcatattcccgcgccatgaccagggaggtgaggagcgccccgatcatggtcatgatggtgacgatgacgccgggaaccaggtagtagtggctgtcgttggcttcattgaagcgggtgcgcgtctgcacgtccagcacgggggcggccccgccgctcagggaggccgcccaggaaccgacgacggcctggaggtagttgcgtatgagggtagcctggttggcgttgactccgttgaccacgatctggactttcgtaacgccgccgttgagcgtgtccggcgcgttgctttgcagggcaatgaaggcgtccgcctgatgggtgcgcagcttttcctccgcctcgcgggaggagaagacgcgggtggtctggaagtacctggagagggtgaggcgcgtttccaggttggtggattcgctggaggccggaacggccaggtacgcgatgcgcacgtttttgatgtccatgctcatgccgtagccgaagaggagcaggagcacggcggggagaatgacggcgatgccgatgttgccggggtccctcaccacctggtggagttccttgacgatgagggcgccgatgcgtttgagggaggccttcatgattcttcccctcccttccgcatgtgttcttccgtgatggtcaggaaggcgtcttccagggaggccggggcgccgtcttcgcggggcggggcatattggcgtatttcatccggagagccttccgccagtgtggttccgtccatcatgatgagcatgttgtcgcagaattccgcttctcccagaaagtgggtggtgatgatgatggtgacgcctttttccgccagggagttgatgcgcagccagaagtcgcgccgggccagggggtccgcgccggaggtgggttcgtccaggaagaggatgtccggggaatggagcagtccgcacgccatgctcaggcgctgcttgtagccgccgggcaggtgcgcggcgggggcgttcatgtacggggtgaggtggaattcctcttccatggaacggatggcgtcccgccgttcctttccggccatgccgtaggccccggcaaagaatcccaggttctgccgcgtggtgagcatgccgtacatggagaatttctgggccacgtaccccacttttctgcgcgcccttgcggcggcggttctcaggtccgctccggccacgttaagggtgcctccggttgccggaagaaggccgcaaagcatgcggaacgtagtgctttttccggccccgttcggccccagcaggccgaagacctgcccccggctgacggagaagctgacgtggttgacggcggtaaagttgccgaatttgcgtaccaggtccgttacccggatgatggtttccccgcttgttccctggccgggagggggagtttccgcgggaacggggatgtcctgcggggtgaggtccgcctgtccggccagcagggtcatgaagccgtctgaaaagtccggctgtcccggctgcgggtggtattcctccagtttccgccgtgtggggtggtcctgcggcaggatgatgcgcacggtgcctccctggggagtggcgttgataattccgggcagggcggccagcctgctctggaactggcgcgcatggatgccttccggcgtgcgcacggtgatgcacatgccttccgcgcgggcgatgacgtccgcgggcggggcatccatcagcaggccccccttgtacatgatgagggtgcggttgcagtaggcggattcatccatgtaggaggtgctgaccagcacgcccacgccttcctcatgggagaactgccccaggatgttccacagttcccggcgggagagcgggtccacccccacggtgggttcatccagcagaatcaggggaggggaggagaccagggaacagcacagccccagtttctgcttcatgccgccggagagcttgcccgccaggcgcgtggtgaagcgttccaggctggtcatggagagcaggctgcggaagcgtttttcccggtcctggccggagacgccgtgcatgcgggcgtaaagctccatgttttcctttacggtaaggtcctcgtaaaggccgaatttctgaggcatgtacccgatggaggcctgaatggcccgcgcctttttaacggagtccaagttcagtacggaaatggagccttcatgcggtttcatcagccccgtgatgaggcggatgagcgtggtttttcccgcaccgtccggccccagcagtcccacgatttcgccggcggagaggcggaaggagacgccgtccaccgcgggaaagggaacgcccgccgggtccggaaacattttgcggacgttccggcagtcaatcaggggctgggagtccgtagtcatggcctgggctgttccggaggctgcgttccggcattctggtccagggggatggtgactgtggcgggagcgcccagccgcagccggttgtccgggtcgtccacgatgatgcgcacttcatagaccagggcagtccggaggtccggcgtttccacattcttgggcgtgaattccgccacggaggagatgaagcctaccgttcccttgaagtccgtatccgggaagctgtcgttgtgcacggtggcggagaagccgggcttcacctttcccagctgggattcggtcagataggcccgcacccatttggtgtggttcagggagaggttataaacaggtttctgcggggaggccatgtcccccttttccagaatccggttgcgcaccacggcgttgcccggcgcgtaaagcacggcatccttcaggttctgttccctgatgaccagattggccttcgcctggttgtactgggccagggactgggcaatgtcttccacgcgggagcccgccagcagcagttccagctgttttctggctacgtccagattggccgccgccacttgctgggaggctacggcgtcgtccgcctcctggcgggagatggatttggtgtcggccagcgccaccagcctcttgctgcgcactgcggcgttgttcagcgtggcttccgccgcctgcacgtttgaccgtgcctgggctatctcctccgcgcgcgggccgtttttaacgcggaggtagttctgccgcgcggcctccgttgtctgccgcgcttcatccacggcctgctgcaggcgcaccgtttccagcgtggcgagtttctgcccggggaccacggtgtccccctcgtccaccagcacggagtcaatccgctcggagatcaggaaggccaggtccacctggcgcaggtccacgttgccgtaaaggacggctttatcctcaggcccggacggagcctcccggtaaatgaaccaggctgccgctcctgccgcgcaaagaagaatcaggaggatcaccagctttttcatgtctctatttatacatctgtataattttttacaagctaaaatacagccgtcatgacggagaaggaattagcggtttactaacggggtcagaacaggcataatccggcgacttttacttttcctattattgatatgatgaccgccaccgagatacgccaaagcttcctggactttttccgcgagaaacagcacacggtcgtgccctctgcttctttgatgccccagagcccgggattgttgttcactaatgccggcatgaaccagtttgttccgtatttcctgggggtatggactccgccgtggacgcccgcccgcgccacggacacccagaagtgcatccgcgccggcggcaagcacaacgacctggaggatgtgggttatgattcctaccaccatacgttttttgaaatgctggggaactggtccttcggggattatttcaagaaggaagccatccggtgggcctgggagctggtggtggaacggtgggggttcccggcggaacggctgtacgccaccgtatacgcgccggacaagagcaagggcgatcccggagagtttgaccaggaggcctgggattactgggcggagctgttccgttcccgcgggctggacccggacgtgcagatcgtgcacgggaacgtgaaggataatttctggatgatgggtgaaaccggcccctgcggcccctgttccgagctgcacgtggacctgaccccggagggggatacgaagggcagcctggtgaacaaggattccgaccagtgcatagaaatctggaacctggtgttcatccagtataatgcggagagcgacggctccatgcgcaatcttccggcgtgccacgtggatacgggcatgggctttgaacgcgcgtgctccatcatgcagtgcacggacgggttcaaggatttttcccgcaagccgtccaattacgccacggacgtgttccgccccctgtttgaccgcctggaggtgctgagcggacggaagtatgcggacgtgtatccggcgcccgggtccaagaaggtaggcgcgcaggatgattctcttcaggaggcgattgccttccgcgtgattgcggaccatctgcgcacgctcagtttttccattgcggacggtattctgccgggcaacaacggccgtaattatgtgctgcgccgcattctgcgccgtgccgtgcgctatggccgccgcctgggcttcacccagccgttcctggcggagctggtggatacgctcgtggagtctttcggacaggtgttccccgagctggccgcccgcgcctccaccgtgaaggaggtgctgaaccgtgaagaggccagctttaatgaaacgctggatcgcggcctggaattgtttgacgcggaaacggcttccgccggaaaggtgagcggggagtttgccttcaagctgtatgatacgtacggttttccgattgacctgacggccctgcttgcggaggaacgcgggctggaaattgacatggacgggttcaacaggctgatggacgagcagcgggaacgcgcccgcgccgcccgcaagagcgaggtggtgcgtgccctggatttgaagacggacgccgtgacggagttcacggggtacgatgtggacgaatgcgccgccacggtgctggaagtaagccgccagggggattccctgttcattattacggacaagaccccgttttacgcggagatggggggccaggtttccgatgccgggttgattgaaatagggcggggacagctaccatgtgatggccgtccagcagatcgggaatgcccgcgcccatgtggtggaagcccgcgaagggctggacgtgaagccgggggaccgcgtgcatctgagcattgatgcggaacgccgccgccgtgtggaggcgcaccataccgccacccaccttcttcactgcgccttgcaccaggtggtcagcccggatgcggcccagcagggttcctttgtatcggaagaccgcctgcgctttgactttaacagcggcgccgtcacgccggaccagctccgccggattgaggagaaggtaaacggctggattgaggaggccctgccggtgcactgcacggaacgcgcctatgcggacgtgaagggaaattccgcgattgcccagtttttcggcgacaagtacggggacgtggtgcgcgtggtccaggtgggcggctgccggaatgaactggacggcgtttccatggagttctgcggcggcacgcacattgccaatacaaaggatataggcctgttcaagatcaagagcgagggggccatcgcctccggcgtgcgccgcattgaggccatgacgggagacgccgccctggagatgatccgtcagcacgtcgttgccaggagcctggaaatcgccagggcggtggaaaagatcaaggaagtcaattatgagctggcggacatggggctggaacaggttccggttcccacgattgaagacaagccggggctgtccgccctgggcgcttccgacatccggacggtgaatgattccctggcgcgttttgacgcttccgtggagcatttcaagcagacggccctggatgcggaaaagaagcttaagaaggcccgcgccgggcagtccgccgccagggctgacgccctgctgaatgaatggctttccgatgaccccgcctccctgatccaggtggcggagggtgccggggaattgctccaggaattgctgaacgggttgaaaaagcgccagtatgcgggcgccgccttcctgctgtgcgtggacagttcttccttgctcctgggcgcttattgtagcaaagatgccattgcggacggattgtccgccggggatatgatccgcgaggtttccgctcttgccggaggcaaggggggcggtcggccggaccaggcccgcggttccgccccgcaggatgccgatccccaggcgctggccgcggcggcacgcaacatcattaacgggtaagcccttcacggggcgccccactggacaccgaccatggacaagaagatttttccggacgaacctgagattcccattctgccgaacctgtttacggcagggaacctggtgtgcgggtttttcgccattctgacgatttttgaagggatcaaccaggcggacagcgacgccgtggcggctttctcctattaccagaatgccacgttcctgattttcgcggcgtgcctgtttgacttgtttgacggccgcattgcgcgcatgcgcgggcaggacggcccgttcggacgggagtttgattccctggcggacattgtctccttcggcattgctccggcgctgctggtggccaaggcggtcctgttccagctttctccgccggaggtgggctggggcataggcatcctgtatctgctgtgcgccgccctgcgcctggcgcggttcaactgcatggccgccgctccccggaaggaggggcagagcagcgattttgtggggctgcccgttccgatggcggcgggcgccgtggtttccaccatgtacttggtgatgtatctggcgggcagggctccggacggggccatggacctgggcgtgttcaagtacgtgattgccctggcgatggcgggagtgtccgtcctgatgatgagccgtgtggtttatcccagcttcaagcacatcaacatgcgcacgcgggggaccatgtacgcgatcgtgctcattgtgctgacggtcatctgcatcttcaaattcccgtgggtgatgcccgcggtcattttctccatttacctgctttacgggctggtgcgcccctgggtggcccgccgctggcgtaacaggctggaagccagcgatggagaataaaagggctttttaggaagctgttcctcctttaaatgggtcgtcgtgcgcctggccagggtggttggcgcggatttgccgtgtttcaaacctcgggcatgcctttggaccaggtctttttctggggaaagaaaacgtccgtctccggaactcgccgcaattttcccgcacggcggtataacgtcaaaccggccgcgcatcacagagacggcggccggttgaaagacggagaaaacggatggcatgcgcgaagggggaaccattgccccgcgggtccggcgcttacttgctcttctttttaaaatcgtcggcaaaggggtccttttccggagcggtgggaacggcgtgcgtctcaatgtccttggtgctcttgaccagcgtgatgcacacgggcttgctgcggttgcccatgtcgtcatatgtgtaaaggaagcggcgcacgagttccttgctcttggaatcgaacatttgctcctccctcaggttggcgttgccgtcgtaaccgtagcgtacgaaaaagagttcgttcttctgcccgtcaaagatcaggcatgagcgcagttctccaaaggggcctcttttgtagagggttacggaaacgagaacgttgtggatgttgtaagtggtttttttcatccccttgccgtccccggtcttttcaaagtagctgcgcgacccgtcttcatgcttgaccatgcgggaggaagcggtctggacgttgaaatcatcctggctggccgccagggctccggccgtcatgagcagggggatgatgagaagcaggggcgttgttttcatggtgaaaaaagtgtttctgacttattaaagtgatgtatagtgcctttgacaagaacgtaattagatgaactggcttgtaaggcgagacatattgaatgtggcgcgcggcggcgtgctgatgggaattgtaaacgtcactccggattccttttccgacggagggcgtttccatacggtggaacgcgccgtttcccatgcaaaagagcttgagcggcagggagcccttattctggacattgggggggaatccaccaggccgggtgcggcggaggtctccgtggaggaagaactggaccgggtgcttcccgtggtgcgggaactccgcccatgcacggacgccgtgatttccgtggatacgcgccatgccgccgtggcggcggctgtgctggaagcgggagcggacgtgatcaatgatatttccggattgcaggaggagggaatggcggagctgtgtgcggaggcgcgctgcggcgtagtggcgatgcacatgcagggacggcctgaaacgatgcagaacgcgcctttttatgaagacgtggtgcgggaggtgcgcggctattttgaggagcgttatgattttctgctgggccgcggcctggtcccggagcagatttgctgggaccctggcatcggcttcggcaagacgctggaacacaatctggccctgctgtccaatatggacaggctggaggtggcgggacgtccggtattgttgggcctttcccgcaagcgcatgctgggagccgttctgggtgatgcggagcaggggcgtgcgccgctgagcaccgccgtgatgacggtatggggacatttgcacggcgcccgtattcaccgtgttcatgatgtggaggaatgcgcccgcgccctgcgcctggtccaggccgccgaaccgtttgtccgctgattgagccatggaacccgcttcttcccgcccggtattgacgtctctggcgtctgttgcgttcgccctggctgttctgttcctgttcctggcggtgcgcggaatttggccgcttggcggccattacctggaatacatggataacgggcagatggtgtatcccaccttgaaatattatgcctccgctctgatgaccggagcgttggacgggtccttcttttatgatgtcaatggaggagcgggcatccgcgtgagcccctccctgccgcaccagctgctggttccctccacctggattgtggtggcgatgggagactcctttctgttgaaggacatggtatgggtgatgctggcggacgcggcctgcatctgcctgacggcttcctggtttctgagacgcgtcttcccctccctgcccgtatgctggaccgtgctgctgacggcgggttatgccctggggggatttttccagaccaagtacgggttcatgcagttcctggaccacgccgccatgttccccctgtttgccctgggcctttaccagctggtgaacggagggagggggtggctgtatgccgtcggcctctttctgctggctacctccatgtacagcgctttcatggccgtcgtgaccggctggctgttcgcgtgggccttcacgcttcccctgaaagggacggcagaacgccgcgtccggctggcgcgcgtgttctggtacacggcggcggtgacgctggcgacctgctattactggctgcccatgatggagatgagccgggattccatgcggtccctgttcatgactccccccactttttttgaactgtcctggccgtttgaccctcccaaattcctggaacgcctgtattcctgcctgccgggaatggcgtgcaccgctttggctgccgtctatctggtttacgggaggaaggaggccccgccggcgaacaaggggaggcggctgtttcttctcctgctggcggcgtccgtgctccctgcgttcattgaaccccttcaccgcgccgcccatctgtggagctacgtggattttccggtccggttcgggttcattcccaatctggtggtggcgtcgttctgcgcctggatcctgtccggcgggaggctgccgcagccggcggggcggcgctggggctggggatggagccttggccttcccgtggcggcgtttgccgtctccctgattgtccttcacgtgacggatatggacctggtggcgcgccttctgcctctgctgtttttttcatgcgcgtggctgtgctggcggcatgcggaaggcaaaaggctggggtggtccatagccgccgtgattctgctggggctgcccgtgggggctgccgcgttctggaagcagggagaagaggaaaaggccgctgtactggccctgaatgcggaatggctggcgcgcggaatggacgggtacgccgggcttctgcgcgtgaaagacagggaccgcctgctggtggacaacgcggattgcctggggcctgtcccgagcatcggcaacttccggcataccacgagcatcagccatttccgttttctgaaaaacctggggtaccgggatgaattcacgcgcacgtatggtcaggggggtaccctgttttccgatctgctgctgggccatggctttttgctggcgtcccgtcccgtggaaggaatggagagcgtgctttcccgggaaggcatgtatttatacaggcttccgggcgcccgctgggggctggtggttccccagagcgcgctggggctgcggctggatgcggaagccggcgtgttcagcaatctcaatgccctgcatgccgcgctttgcccgtcagcggaaggccccctgtatgctcccgtggaagtgcggacggagaggaatggcaacttttaccggatgagcgtgccggaatatcccggcgcggtgtacggcttcccgcagacggatacggaggaactccgcgtcaatggccgcgcggtgcccgtcatggcggaagcgcagaaggcccccggcgggacgtgccgcacctataatggagcattggaattaaagcgtgcgggtgtaaccggggaaaccgtggtggagggaaggatgcggcggctggtggaggctcctcttctggcggctgcggcgcgaatgccggagcaggatgttccggttctggggaaaggccaggatcaatacgggttggaggcgcacggacgcggaggccatgtggaagtgtccctctctgccggaaagggggaggcgctgatggttccggtggtgcatgaccgtggatggaaggccacgcggaacggggtggacgtgcccgtggaaaaggtgggggaattgatggcggtgcgccttcaggaggggcggaacagggtggtgtttgattattatccgcctctgttgaaagaatctctgtttgtttcagccggaacggctctgctttttctgctgtatgcgtggtgggcgcggcggcatccggaatcccagctcagaaggatggtactggcctgtggatacaggctctttctgtgttgcgccgccgtggtgctggcggccgtttatgtggggtccgtcgtgttgtttgtggtgcagtccatgctgtaacggtttccggggaatggagaaagccgccttcagccggttcatgtacaggatttgaccgctcctggcggtcccgggaagcgttgcgggaagacgggtaaaacagcgtgattgaagcagtggggccggaaacgtatacgttccgtggattgttttccatgctgggaaaggtgacggggcccgtcgtccggttttgcccgttcctccgtgggccgcctatgccgccgtcggcatcatggggatgcttcatcgtgacgtgatgctgaccagggatgaaatcctcgggctgatggaggacaggccctgcgttgaaggcattccgcctgccggctccatccggctttccgcaggggcggaaaagcatgccgcggatttgggaaaagcttatgcttgtgaaatgtcccggaggaattgttgatgatgaaattaatgacttaaaaacggcttagactatttctcgcggagtcaagttcgatgtcgttgacatcttctacgtttatttccaatgaattaattttcaacaaaccgggggggaggaagcgtgttcctcttttcaggggttcatttttagtttagttatttttcagcagactgggccggtttcgttgaactggatctgtaccagtggctcagtcatcttttttgcgctccttggcaattagacttaacaattgactttttacgtgtttattttactatttttttatgtttctgattgttagatcttatttatttatttggatctattgttttttatacatgggcattccttcaaatggcggagaattgcctgcttgtccagcttcctttattacgtctatcgtttgcaaccgttcaggagatatttgggttgcgacggaagggaagggattgatgcgcttgccatacggaggggaaaaatgggagcagcaaaaaggaaacgggctgcctgatacaacaaatttctatgctcttctcgaagacaggcaggggcgtatctgggtggggacagacaataaaggagtggctgtgtggaatgggaaatcatggcaacagtacaaccagtcaaatgccttgccgggggagaggatcttcgccatggctgtatctcctgtcagtggagatgtggctattgctacttccggcggcctgactgtttatcaaccggaaacggaatcatggaaagattacacaagggcggaaggtttgccggaggaccagattgcttctctctcctttgatcgaaaaggaactctttgggcagcttttcaaacttccggagtggcttcagcagaaccttccaacggatattcacggtggaatgtagtgcagacaaagtggtattgggatacgctgcagagagttcgccaaccatttgaagccagagggaaaggcctgccttcaaatttttgcaacgcgatttgtgccgaatcgggctggatttgggtaggcaccaattccggactcgggtactctaaaaataaaacagactggaactttctgaggggcagggactatggggcgaaaaatgaaggactatggaaaccggatgagaaaacgtctgtccggcatgctcaaaaactcttgaaaatgaaccgtagggaaaacaatgacgattctcttttgccggaggattatatcacctgtttttatccgtcttcccaagggatgtggataggattcagggaaaagggcgtttcttttgtgcggaaaaatttacaaaaaattcagactgtggatatgccctgtgacgatgaagtggaaaaattggtcagcgtgaccagttttgcttctctgccggatggcagcttgtatgccggaacgtatggaaaaggattattgcatttgggccatgtagagagaaaacggattttcccgttgaatgatgtgaagcatccttctttcccgggcattggacaactgtcggaacttttaaaaaccaggacagcaattgatggaatgaaaaaaacaaatccccctgcaaaagcccttttctggtatgaagactgggctacccggggcgactggtgcgaacgctatggacggagttacatgctcctgtgcggagctgccggtcctatgggttccgtccttgaggcttttgacaatgcatacagatgcgaatccgtcaagggtccacacgtcaaagtgggtgaaagcggtgtatccggaaaagttatctgggaaaatgaacggggtgacgaaaacatcctttactgccccatcagcacgaccagaacgcttgcccggtggagtgaccggggagaatccgtagacagagactttgacggtccggaccttggcgtgctgattcaggttccggacaaaaaacagctcctctccttttatttttatgatccaaccccgcttgccgacaatgatctggacaacagcctcaaggattacatactcgaaatcagaaaactacctgccaattttgattttgactccttcctgggacttggaaaagaggaggaagttcaggaagaagacttattccgggaaccttcctatgacgggcttaaggattacatacccctgcctgttctggcgcgaagcagggttaaatcatttgccggatgtggagtttacaagaatttcatcgtcgaaggctcagggtggtactacgtcagaatattgaaaaactactcagtttctacaaccctcaacggagtatttatctcatccctggacgaaacgaaaattgctgtcgacaaactcctggaaagactaaatcaaaaatcattctactatgggctttgcataccatctccccctcctttgaactccgagcaggcaagtaaactttcttctagcctcttaaaattatgggctgccagccaagacatgaggctgttaaacgggaaagaaatcttctcatcaagaaaacttggaatttatgcctacagacaccttcttgctacccaggctccagatgaaatcaaaaagaactggagatggagactgaaaatatgggaaacggaggacaggaaggacttccggcaacaaatgaaaaaagcgtgggccagtttgcaggatacggtctatttctacagatcttctgaatgggctacattcgcgccggataccaccattcccttttcagtcgatgaagtcagaaaaatgtccgctttgaaaattgattggaaacagtatttgccgggttcaaacaagaaaccggaacttgacgttcaacaaatgaaagaatggttaaagaataaaaaataatgagcattaaattatttactgccatcttcttgccggcattactgtttcatctgatgccgttacacgcggcggaggattacaagtgcgaagtaaaaataactcctggcgagaatgtcgccatgtccgaagatggggataaagccatactggacaagcaggaaggcaaagtttacaaatttaaagctgttgccaaatttactcctgactcagaacaggaatgggtagaataccgatatggtaaaacaagaaagtatatatgggaacctgcgccaatcatgacgagcgaccctcccaggggaaagggaggattttcttctacgggaatttgctctcccagtgaagaatactggggaactgaattcaaggtcaaagttaaggtgaacatgggggtggtcggtccaaagagaaaaagagaggtggccgaagatgaaatggatgccatagctccgttaattcaaatacagttcgccaagttcagggaaaatgccgggggcaatggtttcaccattcacgatcaattcagagggaagcctgttccggttccggaattcaaaagggaggataaaacaccggatgacgataaatcacccgtagggtactatgcaggggatattccttcctttactgtcaccttcaaggcgctgccggactccatgaaaacaatcaaggcaacgtgcaccgacggaatatttgcctctgaagcaactgaattgtccattgccaatggaaaagccgagggtgtcgtcaccgccaaggaagccgtggagagaaaatgccggggacgcgcagaaaatgcatcctggagtttctctgttctgggagtgaagttatccgccaaggaacaaatgaccatcagcaaatgctatgttcttcttgacaggggtaatctggacaagccttggaaaaccctgctgaaaacagcttttgggaagtggaacttcagcggagcgaccacccatgatcagcttatggacaggcttagtcgcggtatatccaacagtgcttcttattacgatgaatggaacccggaagtgggaaaaaccggctccctgtatgtggatcagaaacaaaaccccatgcccttgtcggtagccggaatggtagatgccatcgacaaaggaacggcaaaaatcatctgtgtggaagctgccggtcttatggaatattctgcgtcggttctcggctcgggcggagtcagttccagaggagtcgggtggacggaaactagaaaaacaacaaacgcacaaggacaggaggagacaaaatcctggcgctccggccatgcctggtgcctttatggaggtaaagtacataaccctgttccctacaatgcaggtcctaccaacaaatcggaaagtgattacataaaagacgatttgaaatccgatgaaaacaggagtaattttaccgaacctggcggctgctacttctcatttaacaaataaccatcatgacttgcacgcacagtatgaaaattctcccctttttcttcattgccgtaaccctcatagggcagattcttcatggggcgcctgttgcagggaatgacctgtatcccggccaaacagtctgggaaataaaaccggccgcagtatggaaccagaccaccataaaatccaatcctgctgagcgcaaggcccgtctgtataacctgtatgaggaaattaaaccaggcgggaatcctgttcctggacagtccgaggcggcaaaagacatggaagggctcaatatatctcagtactacctgggatgggactatgagcagaattactgggtcattgtcgatatcatgggaaacgtctacatggccgtcaaaatgttctactccccaaaccccgtctacagtcgtcagaaagcagtagatgaaatgcttgtctcacaaaaacagggacctccggtcaaccgtaaccgtgaataccgatggaccatgtttggtgacggtataaaaatggcatttctgcaagtcccgtttattttagacgaagataaaaaattatgtggggaattctttgcagaacaggaggggttttccctcattgccgctgaccactggttctttccgcttattagaaaagagcttaaggataaagaactttttgaaatatcagagaccatactcgccgcacttaatggaaaacgccaattcgggtattttccgaaaaggacgcggcaggcggtgaaaaagtggaaggatatttcaaagatgccttatcaaaagaggaccaggcatgaagaagaattaaggaaattaacaaaaggcatgcccgagggcttatacgacaggattgatcggaatgctcgtgagctgcaacggaatgataatattctcaacctgaatatgccggacgggaacgaagacaaggggcctgaaatgatacccaatattaatagcggcatcggaacggtgcgctggctcaagaagcacgtaaatatcccttttattgcggaaaaaggtcatgacgaatctcatatcaacggatgttccggtacttttagcgtgaacaagaatggacgggattatcccgtcacctacacgattctgcatcttcatacgaaagaccaggccttgagagcgatgttcgcgatgcaggcggagcaatcaaaacaacttatcaagccggatatcctgaaaaaaatcctgcaggtacatcccggtctggtgggagattacgatgtctgcctcaaaccggtaatcaatgaattgggagtccccgtaccccagggagaatactcctcaattagtttcatacggggtaatacggccgttatgctgaaaaacgagacgatggatatttccgttttgccattggcaaaacaaatggacgaagctttgcttaagaatatgcagttgttcatgaaacccgaagaaacacggtaggtttcttgtgattgaaatttaattgcttagcgaatattggcaaaatagctcaagtttggaagtgcgtcgattggtgattcgagtccgggtaatgggaagaagcgccaaagaaataacgcagccctatgatgttaaaaggaaccactttatacaatctgcccaaacgatgcagggaaatagggaagtgtaaccgcatttcccaggttgtaacccggttccggattcagaagggcttttagttgcggaaaaacttgtctgatgcccgctctttttcctgatgccgttgccgttatgggtaacttgagaagtgacagggattgatgaaatgatgcgattagtgggaaccggcagtgctttatcttttttagagtcctgccttgactcccatggaggaaatgtggtccagggttaattttttgtgtgtcaagccaaagcttgttcccggtgttgttgaggggagttttacctgctttttttctgctattcgcatgaagacattcctgagcggttcaaacatgatggttattcttggttatagttaatttgctgtaaagcgtatcaagtcttcgtgcagcgggaacggctccgttcccttttcaatgttgatgggttgacgtgaaaaggctttccgtttttgaaggatggttgacaggggaatctggcgcggtagagtggtttcatgcagtcttcctattgtccgagtccttaccgttatacgcgccgcgtgacccgtgaagtcatggtgggggatgtgggggtgggcggctccaatcccatccgggtccagtccatgctgacgtccgatacgcgggatacggatgcctgcgtgaaggaggctctggaattggccgcggcggggtgcgagattatccgcctgaccgcccagaccaaggcgtatgcggccaatctggagaatatttcccgtgaattgcgcgcggcgggttgccatgtgccgctggtggctgatattcatttcaagccggacgccgccatggaggccgccaagtgggtggagaagatacgcattaatcctggcaatttcatcgacaagaagaagtttgaagtgagggagtattcggacgccgaataccgtgaggaactggaccgcctgagggaggagtttacgcccctggtgctgttttgccgggagcatggccgcgcgatgcgcatcgggtccaaccacggctccctgtccgaccgcattctgaaccgctttggcgatacgccggaggggatggtggagagcgcgattgagtttgctcagattgcccgggacttggattaccattccctggtgttttccatgaaggcttccaacgtgaaggtgatggtggccgcctaccgcctgctggtggaacgcatgaatgccttggggccggactggaattatcccattcatctgggggtgacggaagccgggggcggagaggacggccgcatcaagagcgcggtgggcatcgggtccctgctgacggacggcattggggataccctgcgcgtttccctgacggaggacgccgtgcgggaagtgcctgtggcctaccgcctgtccaatccgttccagccgtcggagcgttccgatgatcccgtttcttccttccccgaaccggagttgagctatgatcccctgaagttttccaaaaggcagggagggctggcgatgtgttacggggtgcgcctgggctgggagcagcccgtgcgcgtggtggtgccggatgcggggttttacgccctccagacggaacgggatgcgatgggggacatgatgccggagctggccttcggccaactggaggccattgaggtggacccccgctgcggtgacgagctggagccgctgaaggaactggccgaaccgtccgttgtcaccgtgaagaacggcctggacatggaacccgtgtatgcgttccgccttctggcttcccgcatggaagacaggcacctgattctgctgaaggatacgctgatgcccggttccgtttccgatgaggacgtgccgctggtggccgcccgcaatatcggctccctgctgagcgacggcattggagatgccgtgctgattcagggggaatcggatccccggctggcttccttcctgggattcaatattttgcaggctacggggacgcgcctgacgcgtgcggattacgtttcctgcccgtcctgcggacgcaccttgtacaatattcaggaggcgacggcccgcatccggaaggctacggagcatttgaagggcgtgaggattgccgtgatggggtgcatcgtgaacggtcccggcgagatggcggacgccgatttcggctatgtgggcggcgcgccgaacaagatcaacctgtacgtgaagcacacccccgtcaagttcaacattccccaggaggaggccgtggagcggctggtggacctgatcaaggagtacgggcggtgggtgaaccccaagtgaggcttttaacgattccggagaggttccagcatgggaaggatgtttatcagcggcggccacggcggtttggcgcgggctgccgtggagtgttttaccgccgcaggatgggaggcggatgctccgtcacacgctgaactggacgtagggaaccgttccgccgtgcgccgctggtttgacgaacatgctccgtatgacctggcggtgtgcgccgccggaattaccagagacaggccattcctgaaacagacggagaaggagtgggacgaggtgatgaacgtgaatgtgacgggagccgcctggtgcgcccgctgtgccgccgcagccatggcgagggagaagcgggaggggcaggtggtaatggtgggttcttatgcggcgcttcgcccggctccgtcccaggcggcctatgccgcttccaagtctgcgctggaaggcttggtgaagagcctggcgcgggaatggggaaaggagggaatacgcgttaatctggtgctgccggggttcatgctgacggagatgacggccgggttgagggagagcgtgaaggagtctgctttgtccaggcatgttctgggcaggtttaatacgccggagcaggccgcggcgtttattctgtttttgcaggaagtcctcacggcagcctccgggcaggtgttcgatttggatagccggattgcctgatcatgggcagcggatttcttatccgcgttttcatcaatgatggaaaggttttccgaaagaaaagcctttcttcacagggatgcagcatgatacgccatgtgtaaaaagaataggaaatccctgggaacaagggcctcccggtccttgaaaagatatatgaacaggaggatatgccgctttctcactcctgggattttatgctttatccgaaagccggaagcctgccgttcccggcggaatacccttaaaccagcggaggttttttctcaaatacttttccctcaagcttggaacttgaccacggataagaaatccgttgaaatatccccatgagcttgctgtcggctggtgatcagggaaaaggaaagtcttcttcctatggtagtctggatattcccctgtcgcggaattatggaatagacgccttgcgcattgtcgccatgatgctggttttggttcttcatcttttggccgccactcatgtattgccgctggacaatcatgattccgcttcctaccgggtagggtggcttctggagattgccgcctattgcggggtgaattgttatgcgctgattactgggtatgtatgctgtgacgggacgttcaggtatgaacgcgtggttaccttatggttccaggtgattttttatacggcgggcagtctgctgctggtgctgctgttttcctcccaggtggttcattttaatgacgtcctgaattcgttgtttcccgttttaaccgtccagtattggtatgtgacggcgtatgtagggctgtttttctttattcctttccttaatgtcctggggaaccggcttaccaaatcacagttccagtatcttctggttaccgtttttgttctgttttccgtggttcccaccttgcttcacagggatgtgtttcctgtagagggagggtattccgtctggtggctgggcgttctctacatgctgggaatgtatattaaaaagcatggcctgttgactggaatgaggacgggcgccttatggatgctttatgccgggtgtgtatgttttgtctgggcgttcaagatggttcttgacgtggtgtccccgtacctgattggacagataaggggcggcggaacgtttattgcctataattctccgttcattgtaggaacggcggttgccctgttcctgattttttcccgcatgcgtttttcatcccgcaggacggttgcctgcatttcatggctggcggccgcctcgttcagtgtttatgtgctgcattgcaatgttttgataggcaaatggtttttatgggatgtctttgaatgggccgcgtcttcttcccctgcgttgatggtcgtgaaggtactggcaatggctgttgcggtgtatgcaggctgctccctggtggatgccgtacggcgttatttgttcaagactatggacgttaacagggaagcccgtgcagtcgtcggctttttcgggaagctgggccgtgccttccggaaagtgtgccgcagattgtttctgcattcctgaaggcaggggaaacgttctgttccgttattccgcacaactcgtgtttgagaacgggatggttttcccgcttattgctgtcccctgcctaaaaggcccttgagccagggaatgaccaggtcttttttgaagaagtggttgctcgggtccacattggcgaggcggaaaaaggcgtctctgtccagccctgcgggcaaatgttctccgtgccagcgttgggccgggtctgcaaagcggggctggtggcggtactggaaatggtccggcgctccggctgtgcggtaggccgcggagatgagttggaagtccctgtccagaccgccttccgtacagattacggggcggggagccaaagcggccacaatgtctggaaagtcaaactgcttccagaaacccggaatgaggtggcggatggagttgggcgcggagcgcactcccctgctgctgggcatggtcatgactttggcgcgttccaaggtacggcacaggaagtcattgtacacaaaggcaaagatgtccggattcaggacgcccagcaccatcatgggttccgttcccagggagaagccgctcaggatgatgcggtttttctgcacccaggggcgtgtttttacccagtccagaacgcattggtccatataggaggtgtagcccagccagctccagtccatttccagcaggaaacgggccaggttttcatagtcgtgggaagagcggccggcggcgtgctcggcgtcgccctcctctcccgttccggcgttatccaccacaacggcggcccagccctgtttgacgtagtggcaggccatggcgttgctgcccggctgcggtacggggggctgggccaggtccggcgacgtttccgccgccagttcttccttggtttgatcagaaccggggatgcagaatagcacgggaaccggatttttttctgaagcggtatccggaacaagtaccagaaacggtaccgcagcgcccgggaggggataggcttcccatttttctacccggtagtgttccctctgcacggtttttaccaggacgggtgcgggaaggttgtcatgaagggggaatttcatcagtttttccatggcttcccggactttcttctgccaggcggggaagtcttccggtctcatgtccggagagaatgcgcatgccggctgaatgttttccagcattgtttgcacgacgccgcgggaggagacgtgccgctggtcgttccgggaggaatggagtaccgcccagtcagccgcctggaattttccttgcggtgaggaaaaggagagggagggaaggcaaatggccatgaagagaagagataaaaatccggcggtctgaatggtcatgggactatgattgccataaaaggaagcccgttgcaagacggcaggggtaccgtttttcctggctgttcctgacgtaccggaagcttgagtttttccgggtgcggcagtagtctggccgccgtcatgattgcggggggaaaaagtcacggaagaccggagccgcgggtatgcggcctggggctggcttccggctttggcatgggggcggcagcccatctcaccggagtgagggaagggcgcagcgtgttgaagccgttgagggaactgtggggagcggggcatccgtggggcgatgttttgagcgggtggattccggacaggaagcttttatgcagccgcaggaacggccctgcctcccagttggcgctgctgctggcgcggcaggccgtggaagaagccggttggggagaggaagaattgaaggatgcggccctgattgtgggcagttcccgggggaacgcctccggctggctgagcccgtggcccggacggcggtccatgaagattctggccgttcccaattccctgcacagtgagcttgcctcctgcgtcagcattgaactggggattcgcgggccttaccacgtgctggcgagcggctgcgccgccggtctggatgccgtgggcatggcggccatgctgatgcgtcagggaattgtcaggagggcgctggctatcgggctggatttgcccttgtgccgggagctgctggggacgtactgggcttccgggatgctttcccgcaacggaatgaatgatccctacggtccccatgccgacggcatgtgcatttccgagggaggggcggccatggcgctggagttgtcttccggccccggcatttacgtgaaggattatctggtgaattcagatgcctacagcccgctgggaatgccggaggacggaaagagcattgccgccctgctggatgccgccctgcggaattgggatggaagagttcctttgaccgtctgtccccatgccagtggaacggcggggaatgccgcttccgagcgggccgctttaaaacgggtttttggaaccggcattccggatttaaggatgatgaagccctggacgggtcatgccattggcggcagcggcattctggaactggccctgatgctggcttttatcagggagggggctttgccacctaatcctttctgggtaagttccccggcaggtgcggcttgtgttgcggaagaattgcctttggatgggaggcggatgctggttaagtccgccgcttccatgggcggccataatgtagtgctgagccttgacgtgggcggctaacatgtttctggagcgagaacgcttatgaagaatcctggacagtttttatcagagttgaagtccgcgggactgctgcgcgttctgcggaatgtggattgcctgcccggcggcatggcccgcatggaggacggccgggaggtagtcaacctggcaagtaatgattacctgggcctggctcatcatccggccctggcggaggctttttcccgtgcggcgcgtgatggcggggccggggccatggcttcccgcctggtcacggggacgcgccgggcgcattccggtctagaggaggccctggctgatctgaaggggactgaagcggcggtcagcttttcctccggttacgcaacctccctgggggtgattacctccattgcggaccgggaggatacggtgctgatggacaagctgtcccatgccagcctgattgacggggcgcggctgtccggtgcccgcttgtccacgttcctgcataacgacatggaatcattgagaaaaaagctggagcatttgcggagcgcgaatccttccggcggaatcctggtggtgacggaatccgttttcagcatggacggggaccgcgcgcctcttcaggaaatcgtgcgcctgaaggatgaattcggcgctctgctgctggtggatgaagcacacggattcggtgtgctgggagaacacggggcgggattggcggaggaactgggcgtctcctcccggatagattttcagatggggaccttgagcaaggccgccggggtgagcggcggttatgtagcctgttcccgcgcctgggcggatgtgatgatcaattctgcgcggtccctgatctattccacggctccgcctcccgccctggccgccgccgccctggccgcagtggaagtgatccggagcgcagaggggcaggaactgcgccgtcatgtttccgtgctggcggatgccttgtcctccgcgctgggaatgcccggcaggcccgtttcctccatcttccccgtggtaatgggagagaatgatgccgccctggccgcagcgggtacgttgctggaacgcggttttctggctcccgccatacgttatcctacggtcccccgcggaacggcccgtctgcgcgttacggtaacggcggcccatcggaccgtccagatcgggcggttgggaaaagcgttggcggagttgctccacggataataacataattacttgaataatgatgaaagcgttgtcttcccattcccttcatttggtcctgagcctgtttttcctgccgatgatcgtggtgtatgccgtgaccggcctgctgtacatgggcggcgtggaccagcacttcacttcccatgtggaagtgcatgagctgaatgccgccgaccagccgccctatgaggattcctgcagggaactggaacgccgtggagtagcattgccggaaggaaaggtaaggccgttcaaagggaactacctcctgggtcctatgacggatacgcatgtgctgttcctcaggaaaggccatgccctccgggcggaagtggtggagcctggcatttaccccaatctgatgctggctcacaaggggaaggcgggatggtggtttactgcgttaggatacggggcggctctttccctgattatactgtatgttaccggaattctgctgatgtggaaaaaccgcgggaagcggaaattaatgctggtcagcgccttcttgggaacagccgctgtggtggtggggtatctgatgctttgaggcgtggaatgacagccggatgtccggaatggcagagcttgcatcttgacaggaatgctctcttccagtaagggaagggatgaaggttccaaagggaattttcactgaactccatagaataacacgatgatgaatgctcctgattcttctccccctccgtcctgctgcagcggttccccctcctgcacggctgctttggtcctcggcattattgccctggtgctggcgttgatcggatttttcccgtgcctgggctggattaccctgattcctgcggctctgctggccattattgccctcatcatgagtattgtggctgtgagcaagggctctcccaagggcgctcttgtcgtcgccattattgcgttggcggcatctgccgcagcaggcattgtgcaggcatggatggccagcgcgaccgtgacttacatggaacagcaccaggattatgtggaaaagaaggcgcaggagatccagaaagagcttcaacagatggagcagcagaaccaggagcaattgaaaaggctcagggatgcggaggattcctcccccgctgatgaaacgggttcccaggacctgtagtttctgaaacgctttcaagggagcacggcgatgaattgcatgcgctctgcgtggcgttcatgccgcaatagctggatgaccaggaaagtgtggctgcctgcatgggccatcctgtccttactgttgttggcgccgtccctcatggccctggcagtcagtcctgccgggatgaattcactggcggcttccgtggccgtgccgcaccgggaatgtcctttgtgcggcatgacgcgcgggtatgtggaaatggcccgcggaaatatacgcgctgcatgggagaggaaccggggcgctccggtctggtttatggcagggctgctcaatggaggagctgccgtgttttatctggcatggtgttggcggaggagggcaggcttggggaagaaaaatggtcttccgggatgaaaaaacagcaggcggaaagggaaaaacaacttcctgaccggtgcagggccatggatgtgtcatgcgttttttgtcatactggcgatgttctgaagaaggcatgcaactagggaagcagtatgattgaccatgcaatcatggtatttatttttagcgcattgagaagcgttcggtctttgttttgacatgagccggggatgttggaacaggagagagccgtcaaggggcaacagggaggttccttgacagattttacacgctttctttaacattagagcgtttccgtgtctggaaatccaatgaaaaaatgaaagatgaacaaaataaactactcggatccccgccgttccgtccccgataccgtttcaaccattcttgcattggttctgggtattgtaggattgattctcgcgttgctcgcctttcttccatgtctggggtgggtagcaattgtccccggccttctctgtgccattctggctattattctgggagcggtagcggtaaagaggagtgatgacaggacgtatggttctgccaggggcgcgctgacttgcgggtgtgtcggcctggtgatcattattggagcgatcatttatcagggcatgattctggcgcctgtgatgaaacaggcggatgcccatacggaggaattcacatggacggcttgcagcgctgtgagggaggcgcggaaggaaatgcaccccaacgcatgcgaggcggtggaccgtgttatctctttgatcgaccatccggaggaaagaaaagagacggtgacggagaggttcctggaggtagcgccaccggctccaaggggcgctactgccgtactggaaggcccggtgccttctgtttccggtaaatgaggcggtaaaatctttgaaggcagggcacccggtgttcgtttaccggctgtttcttctgtcatggaaatcctgcaggcagggcggtttgaagggtattgcatgtccattcaaaccgcccttcttcatgcacgcggcaaagaggctttggctggcggaaacgtacggggcggagaagggtctttttatgggattcagcatattgagtcttccgtgcggatgagaggaaagagataatttgacaggaggggtggacggaatggatgcagttgcagactttttccggcagtctgaacggctggttggagaagagggtatctcctgcttgtgataatgtccatatcggtggaaatggggccgggtattcattttcttttcttgccgaggggcaacgcggaggaagggccggaagaaacgcatgagaggaaaagacagactcattcctgccaccgtgaaaatgcctcaatttatttgaaaccaatgtcctaggcccgttaaaacagcgtgcattcatacagggtaatgatgaaggttggaactgatgcaacgcatcatttcattacaactcaacgattatctgtatgaatgaatccatatcaaattctccgcagcctgatcctgtggagcagccgggaatcatctttttcattccctgcaaggcaaacaacgctcctctgctggtggaagctgtacagggcatccgccgtgccgttccggaagcgtctgtcattattctggacgatgaccgggcacgctgtccccaaaccgtcagggaagtgctgaggaacatgtccgtggaatggaaagtgctgaagaaaactgatacgtcctccgaacatgcggccgctattctgactctgatggctcaggctgtgcgccatgaacatgatgtgctggtgcgcaccaagccggacaatctcattctccatgccggttttttaagggaatttgcccgttccgaagcgggattatccggaacctgtcttcggtccggcctgctgtgcaatgaactttatgccctgaagcctgctgtgcttcgggccattctccagcatctggagcaatcctcctccgtgatgaaatgtccggagggcgccgtcatcctgggggcgtttaccgccctgttcccggatggggccccactcctcgccagagcatggacgcgaggaaccggaggtcccctgtgggggcattacaactggacgacttttccgtctgcggaatccctggcggacatggacatggtatccatgagccggcgttatcaggacaaggtggcgcgccgcgcccgtatctccgtcatgagatgcctgcggaacgccatctgtaaccgtcctgtttccgtggaccgtcaacctgccgcctgaacctgacccaaagcatctgccgggaatggggccggggaaattccatggcggcgttttcccttattcccggcaggtgcctcaacgacaataaaacaatgaaagaaattgataatcagttatccactccggaacaatccggaggaatgcccagccatcccgttacattcgtttccaatgatgaaccgtctccgatgccgtggcccaatacgtggtaccctgtcactcccatagggccggagacggaatacccgtgcccgtgttccgagggcgactccggtacgggaagtacggacaacaacagcgtggacttctccatagaattcggacgctttcccaagtggccggaattgagtggaggccgcctgatgctgaacctgaacatgatggatgccgggttatgctgggggaccgctttccagtacgagcacatttcccagcgccgtctggaagtggctgaaaccctcaatgcatccatcagccgcccggaagaaccggaagacgtttcccgggcggtggtgaagacggaaaaaggatttccgcgttattacagctttgcctctccaaatgtttccggggcagaggttcttggcggtagccagatgttccaggacaggatgcggcgcgttgtggtggatggcgtttcctatctggaagaagttcaggaaagcggcatgaccatgcgcttccgccccaattccgctatatttgaccatatcgtgacgccgcgcggcgtgaaaatcacctttgctgaactggccgcggaacttaaggtagtcaggcaggacgcctacgacgaacccggcactgcggtggaaactttcaactccctttccctgttcatgctgaagcaggtgtggaacaagacggacggcttgctggatctaagcaatgttcagagcattagatggtatgcccccgcagacgtgacggggcggcacaacgatggcacgtatatcatccgcaaaggagccgttccgatcaagacatggaagctgtcctggtcgttcgcggatacggagacgatggtcgccagggctgtggatgaagaaaatccggaagtgacccagatgctgttgcagacattccgtattgaagaaccgggaggttttatcagtgaatggcgcgcgggcctttacccggacgatctgaccctggtgaaaggagagggggatgacgccatcagcatcgtcaccagatgccttccggcgcccggccatgaaaacctggttgccaaggatattaacggacaggccatggtggcgggagggtactatacggacaagaaggaaaaattcaagtatgtgtacagcggcgtggccggaaccgagcatgccgtgctgtgttccgcagaaaaggaagtataccagcgccgtttgtacggggacgtccttatctcccgcacggaaggatatggaaccccgctggaaagaacatggacgtacggatacggcagcgatccttcttcccccaattatggcaaacgcatcagggaaacgcgcccggacggagccgtggtggagatggagtatgattccaacgggaacgtgattcaacggacggagccgtggtatggggatatttctatgaggacttcctattcatatgcagatgaattgttcaatgaccggagaatttctcaggagcttgtagaactggtatctcctcagaggaccgaatgtctggaaaaaacacagtatgaatacaataagacagaacaggtttattcgaaaaccgccacacgcacctatctgggttctacaaatgtgggtgttctgaattcggtaactacggttgaggaatggtacacagctcatgactgcgtgtatgcgccaggacggttgaaatgcagatatcaatatgaaaacgtgcaagatgtggataatcctgatatagtaaataatggagaggccagaaatatttcacgtcgcgaatattctacctgcagtgattatggcgctgtttggaaatgtacagaggatgactatatagatgtggcggattcagaaaagtcctccaggataattcgctattatgcagagaacggcgatgaaattgctacagaccatcaagttcatttatattcgccgggatttgtctccattgactttcgccggatgtcttatgatccttcacatcgtttgatccggacagattacgccaatggcttgtattccatgatggaatggagttgtgcgggaccgttgtgggaaacagatgtaagagggctgcagacgcgttatacctatgatggggccaaacgtctggtgtgtgtggaaagggatgctgccgtggctgtggaaaattggaatgatgtagatatgaatgccgattgtccggatagtataacggaaacgacatacgatgggatggggaggattttgtcagtgagccactccataggggacaggaaaacgacggtttcttcccaatatgatttactgggaagagtcacttcccggacggataagatggggcgaacctccctttattcttattcccaagacggattgacaatgactgaaacaacatcgcccggagctacgctggtgaccaggaaagctccttccggcctggttgtggaagagtccggcacaggacgggaggcgcgttattatgaatataaggcggactggtccgggatttggaaatatatacgccgtctttcctcatccggagatatgatagaaaatattctggaaaatgcagatggcaagatattgagaattttacattctaacggcgctgtgatggtagaccagtataacgccgaatataacggattcgggcaaatagtatgtgaacagcaaaagaatgaatgcccgttgtggtaccattataataacagaggagaactgacgggatggatgaggagttggaatgactggcctgataattctccatacaggtattcagtggtttcccgttatacccgcctgtcttttcctcctcccggattgtctgcttcagcggtaaatgctgtctggcgtatggactacgtacaggctatttgtgagggattggatgctgacttcgaatatacatatacattagtctccagaacggacagtgccctgcaatctttggagtcagtcgttatgagggagaggctaccggaataccgttccatttgggaaaaagtttacaatgaaaacggtaatatacgtgttctaaggggacggaagggatgtgacagggaagaggaagaagtcatcctgaacggggataccgtacgcctgatacaaatagatgggacaatgacccagtacaagcgtacttacagtatgaccggagatatgcttacaatccgcgatgcccgtggtaaagacatgaccatcgtcaacgatgccacaggaagggaaacaagccgaacggaccaggacggagagacgactactacctcctatgatgcggttacagggctggcaaattgtattgtaactcctgatggcaagcagacatggttttcctatgattttcgtggacgcttagtgcagcagtatggaacggctgtccagcccatcaaatgggaatatgatgccatggaccgtattgtggctctgcatacctatcgtgcatcaggatctgttctggatgcgattccatcctcggattccgatatcacacgctggacttatgaccctgtgagtggacttgtggtgaataagacttatgcggatggttccatgacttcgtattaccatgatgactgggggcgtctgggaactcgtatccagtcccgcggagtgacgacggaataccagtatgatactgtatcaggaaaaatagcttctataacgcatagtgatggaactccgtctgtgtcattttcctatgataggatggatcggttatcttccgtccaggatgcatccggaacacgttccttttactattgggatcttgaagatattgcctacgaacaaacttctggcatggtagcaagcctgcttgagtaccagcgtgattctttggatcgttcgtccggatatacgttttctctgaatggaacaatggtacagcaggtcgctctggaatatgatgtcgcagaccgcctttctgcaatgtcgcttaatggttcatcctttacgtatggatatgattcggctacgggctggctcaacagtttgacctatccgaatggattggttagaaacacagtgtttcatgccaatcttcctttgccggtgtccctgacttacgtgaagggaacttcctccattcctgcgctcaagcacgcctatacgtgggacagtatgcggcgtccttccgtacgggaagactatgtgggttcaactgctctttcccgtcgccacacatatggctacaatgcacgaggggaattgacggaagacaccatgaacgcgggaggagccttcagctatgactatgacaatatcggcaaccgccagacggcggcagaacaaggcatttccagtacctatcgaagcaatagtttgaaccagtatgctactgtgacacattcaggaacagccttcgcacctgtgtatgactctgacggtaatcaaacgagtgtgaacacttccacaggaatatggtctgtccagtataatgcggacaatcgtccggtggtctttacacagggaagcaaaaaggtggaatgtgtgtatgactatcttggtcgacgtgtggaaaaagtggaatatgatggaaataacttgaccagacgtacaagattcgcgtatatgggatatctaatggtggcaagcatggactgcacgcaaaatacctccaatccgcccttgctgggtacgtggttttgggatccctctgaatcggagtcgacacgggtattggcgatgtgcacgcacaatgcggacaagagcgtggccaccacccgttatgtggcgcatgacctgctcaaaagcgtaagcgctctgtttgactcctcgggaaaccgtcaggcgaagtttgaatacacgccctacggagaaaccttgagttcggaaggaattaagaccgcgtctatgccattcctttattcctgcgagtaccatgacgaagacttaggtttaatttactacaattaccgccattacaatccacaagatggtcgctggatatccagagatccgattggagaaaaaggtggtgtccatttatatggatttgtaaaaaataatcctgtattaattagtgagtatctaggtctgtctttttcttccagagaagaacggtatggagatggttgcgttttaacacaggaccctagtgatattacagtgactgaggagtttgctggaacacgggaaaccgaaagatatgtacgtaaagtgtctgaagcagtaattgaaaagcacactaaacgtcctaaacttgtaaaaaccgcagttaaaggattagatgctttagggatgtctttcactacggcggcaccctttttgctttctttacaggtgaacgtaaaagtagaatttacatgtaggtgtaaatgcaagtgtgaaggttggttaaaaaatgcgctgtatggagaagcaattgctccaatgacaggttcatttacaattaatagcagaacctttggtaacgggaatccatatactgacggattgggatctatcaacaagataccaaaaaaagaggaaattgaagaaaagaaacaagaagaattcaataaacttttttcgtcaaaattaaaagaatgtgaagagaaatgtaaaaagttaagataaactagcatgaaatgtaatataagtaaatattttttatggagtgcaacaggggtgcttttcgttgcaaatattgtttggagtataatttttctttcaacccagaattctgtatgtgatccggaacaggatgatatacaaatgtgtcaggaacaaatagaccgactttcctatattatttcattatctgctgaaatggcagtattgaggaaagaaaagggtgatatgaaggagcttgaaattctcttacggcaaattgtagatcagataactgctaatgtcatagcaaattccatctatgaatttgatggaaaaggcttagtgaaatttgacttaatgaataaaatatttaaaggattagtagatgccggcttgattgatccggaaatattgcaaagtccattaggcatttatgaagatgcaaaaaatcataaaataatacataacttgtattctttcaatggtaatactgttaaaaaaactatgacggtggatgaatgtaaaaattttcagaaatggttttatgataaaatagtgaatcaagttgagaaggattagttttagtttttattgactttacatcatttaatgaggttgttttatcaaattaaagcaacctcattttttttaatatctaagagtaacactgaatgtagaaatgatccaagctatggcaatgcaatttcgctattcctgtgaatgctataacgagaatttgggcttaatatactacattaactaatatattgattctactgtgttatttgattactggcactcatttcagttcatctataggttttgatgtttttagttatccgtaatatcagtatctcagcagatagtacagatgtgctagacagcaataaaaaggagcgatgggacaagacgtacaaatatacttaggtagatcatttgggatttaaatgctaacgcagatgggatccctcaagagagacaaatagactaaagtagctacacgctagggaaattggaaaatataaatccttctaaatttgtagaaaattcctcttcttcttgaagtaagtttctcgtatttaagagaataactggttatcggccggatgaatcgacaatacaaaatatgaaattcgaaggttgattttcagaaaagaaataacggtcaatatgccgggaaaattatgcaaggtcagattcaacggagcaatatattgatgcagtcgtagatgccgttcttaatatgtataaggataaaagtaaaattactgttgataaaagagattgcgatatcatatctttatctaagtttttaatataaagtaaattatacgccgaggtacatatgtgcctcggtttttgttcatagggagctcagttgatgggaacgagcatggattgcctgtcctacacctccaattcatttttatttggcagacagctttggagctttctgaactgggggtaaagcggggtttggggtgcaaggtacaacgcgaacagggaagaaaaggcaagtggtgcctaatgttattccaggggctacgggttattggccattgtgtcaggatagactatcaatgctattggaagagagggagatgagtatcgattccctttttaaatggtgctgccttttgaggagagctgtttttgtcctattgcctgtggtcttgtgcatgggatggtatatatggacttcatggaaggattggtttcgctggcatgggtccgatatttgaagcgtttcttccggggagcgaatcgtgtgtgaagattgaggactattcacggaaagcctgtttggttcttgaaaagcgaagaggctttcgctgtctgtttttaaaatggtttgaggttctttctgcttgttaggaaagaatgtttttttactttgggtgaaagtggccgcgaatagaaaaagcagcttgacctgccttctccgattgactatagggaggggccaagtggaagctcccttagaaagctctcttgagactgtctataaaggattgccggttttttaaatgccgggagggggaggaaaggtctgctgcgcaggattcttcatgaacgccagaagcgttccagatatggaatattttgctttttttctttattgcatagttttctaatattgctttttttgatgaagttgcgctgttttctaacatttttattctaggcccgtttgattttatatatatagtttttggatattgtatgaatatttgcatgtccatctatagatcaatcgaattgcggaagaatacatccggaagttataaggtcagactaaccattgaccgggggagcaagttctgcggcgccaggaagtcgctcggtcttggcacccatcaggaggattgtgcgttaaggcgcgcctacctgatgcggtgcttattgttccatatgggatggtttcccggtggaaagattgccgtcaggaattccgccgaatgcggtattaaggaggttgtgtgggacagcatggactgcatcggagattccggaatgttcaggctcaccggaaggggctgccgcgtcgccacggatgaaacgatggtcatctggtttcaaacgaatggagatgaggcagtgcagtgtcttcgtttgcttatttccggatggagaatagatgaccgggcgggtgacctgagggttttgattcagggattacagcattgcgcctcggaacagcgccagcatccctgccggattttgaatattgaaatcgggtctggttccatgatggcagcgcgggacgagtgtgtattgaagggctagggagccggaccgttccggttaagtcaattttcaagagggttttctgaacggtcggaattgcttttaatatataacgaataagaacatatggattgttttgaagaacggcggcaggttctactgcaggagctggccgccctgtccggggagggggctctgtacggttttttaatgcgccagggggaacagttgccgccctttgcggaggaatggaaaacggaagcctgcctcctgcggggatgccagtaccgggtatggctgcggctggagcttgcaggcggtctggtgcggattgatgccgatagcgattccctcatcagccgaggtttgatggctctgtgggtgcgtctgttttccggactgaggccgggagaagtgctggccgcagagacggatttccttcatcagggtgttcttggcggctggctgattccttcccgggcgaatgccctgggcaatatggcctccagaatcaagttgggcgtgctgcggttgaagcaggaggcgcggaaggaggccgcagtgtctggctctccttcttccctgccggagctttccttggagcctgttgaacaaggcccgttgcggcagatggagatgtccggcagttcctgtcatgatgatcgcaaacaggaaaaagagttccagcgatagagttattgatgatgaaaaagaaagcaagcattcacgttcatttgttcgtttattcgggagacgccgccctggtcggggagaatctgctgtgtgtccggcatgccctccccggagcccatttggtcgtgattgacgacgggcgccatccttgcccggatgaggtgaaggcgcaggcggaggaactgggggcggaatggcgcgtgtccttttgggaaagaggcggcaatttgagggggaaggcctgtattgaagggatgctgggggagatgctccggagcatggacgatgaaggggataccctggtgaagatagatgcggatacggtgatggtgtcgggagatgatttgctgcgttttgccgaccggagggagatggtgttctggggcagcggttccgtggaacagcgtgtttacggctgcctgtatgccttgaaggcgtatgcggccgtaaaaatccgggagtatgttcgcaggctggagctgctgccggacgcgccggaagatattgtgataggcaccagcgcttttaatttatatcctggagaggaacggcacatggtttatgctccctttggtccggacgcgccggacagcgggtggacggcgtattactggggacgttatccggaggtgaagggttaccagcgtttcaccatggtgacgacgggcaatcctcctccgcagccgctggacaagcgtcaccgtttgcccgtcatgaagaatttacggcagatggcggatatccggcggcgtctgacgggcgccgggcacggtttataggaagggatttctgtcttgccgttggcgtggttccggatgcaggaagctctttgaatgaaaaacccccggatggaagtttttccatccgggggtttgtgtttaaagattccggttattttttagcgggcagtttcacctggatgtgaatgtcgcgcaattgccgctcttccgcagcggcgggggagtcgctcatcaggtccgctccgcgattgtttttcgggaacgcgatgacttcacggatagattccgcgttgcagatcatcatgaccaggcggtccaggcccagcgcaaggccgccgtggggcggagcgccgaagctgaaggcgtccaggatgtggccgaattgttcgcgggcctgttcctccgtgacgccgagcgccttgaacatggcggattgcaagtcgcgttcatggattcggatggagccgccgcccagttccgtcccgttgagcaccacgtcgtaagcctgggcgcgcaggtctgaggagagttctcccttgagcagtttttcctcgtcttccttgacggggcgggtgaaggggtgatggatggccacccagcgctgttcttcctcatcccagcccaccagcgggaattcgatgacccacaggaagtcgcgttccgtgttgtccttaagcagttccatgaattcggcgcattgcagacgcacacggcccaggatatcgcaggagggttcccacggaccggccgcaaagagaacgaggtctccggtttcaatgttgagggcttccgtgagtttttgcttttcttcgtcggaaaggaatttggagatggggcttctccagtcttcctcgcgcaccttgatgtaggccaggcccttggctccggcttccacggcggttttcgtcagggcgtcgatttgtccgacggaggcggagccgaaccccttggcgttgatggccttgaccacgcctccattgcttacggcggaggagaataccttgaacccgctgttttcaaagatggaggagacgtccgtcagcttcatgccgaagcggcgttccggcttgtcggagccgtactggtccatggcctccctccacgtcatgcgggggaagggggtgggaatgtccacgtccagggattccttgtacacgcgcttgagcaggccttccaccaggttgtagatgtcttcaggcgtgatgaaggaggcttcaatgtccacctgggtgaattccagctggcggtccgcacgcaggtcttcgtcacggaagcagcgggcgatctgaaagtagcgttccatgccggctaccatgagcaattgcttgtactgttgcggggcctgggggagggcatagaatttgccgggtgccaggcgggaggggaccaggaagtcgcgcgcgccttcaggcgtggatttggaaaggatgggcgtttcaatttccaggaagccgtgttcatccagatagtcgcgcgtggtcttggtcacgcggtggcgtatctgcatgttgcggaccatggacgggcggcgcaggtccagaaagcggtacttgaggcgcaggtcttcattggagagggcccggtccagctggaaggggagcacgtccgccttgttgatgacgttcagggtgtccgcggagacttcaatttccccggtcggaaggtccgcattggtggtgtccaccgtgtccgttttcaggcgcgcagccacggtgccggatatctggatcatgtcttcggagcggagctgctgggaggccttcgccacgtcctggttgacttccgggtgaaagactacctgcgtgatgccggagcggtcgcgcaagtcgataaatatgacgccgccgtggtcacggacggaatctacccagccgatgagggtggtcggcttgccgatgttcgcagcgcgcaattcgctgcaggtatgagtgcggtatgagttcatctttgttgaaaatggaagggaggaaggaacgtatcaatcacggccggtcagggaggccagggcgtcaaacaggttctccatggcgacagtggaggaggagcgcgcatgcaggtcgcgcagttccagggcagggaattcgtctcccacaatcagggccgcgcgcgcgccggatttgacggctttctggagctggccgttgattttggtgagtgtgaggggaaggtccacgctgtacccctggtcccggagggcggaggcgatggagagcatttccgcgcggcggttttcggaggcctgcaccatgaagacgtcgcatcccgcggcggccagcgccgcatccttcagcgccttggcatggggggtctggtcaatgaggtgggtgatgacggcatcccccatggcaaacccggtggccggcatgtccaccgcattgttggagagggcgcctaccagcgtatcgtagcggccaccgccagccacggcgcgcaggctgcgctgcgtgtcaaagatttcaaagaccagcccggtgtagtaggccaggccgcgcaccacggagaggtccagcctgacgtagccgtccagtccgcgggcttccaggtctttcagcaggatgtcatagcgttcggaggctccggcgggcgggttctcaatgaaggccaccaggtcgccgcggctgatgtggaaggagtccagcttgcgctggcattcttccggacggtcgcgttcaaatttgtccacaatgcccagaaaggcgggaatgtcctgttcctgcacgccgtgttccgcggcaaacctgatccaggcttcgcggtcggagacgcgtacgatgaagtcgttctgcgtaaagcccagctccctcatgcagtcgatggccagggcaatcagttcagagtccgcccacgcggagccttccccaagaatgtccgcattgaattggtagaattcgcgcaggcgtcctttctgcggtttttcgtaacggaagcaggagccgatttcaaaccacttgagcggcttggtgtattcccgctggtaggcggcggcgatgcggcccagggaggcggtgagttccggacggatggtgatgtccctgtctccctggtccgtaaagcggaagagctgggtgggcagttcgcccccgctctttttaaggtaaagctccgtggcttccacggtcgggccttcccattccaggaatccatagcggtgcgccaccctcttccatgcgttaaagagatagttgcgcacggcgcagtccgccggtgcaaaatcacggaatccgggaagtggttgaaagcgagcgtctggcataacctgggaaaaaggatgttgtctgaggacgaaacagtttacagaattcccatgccttggcaagtccacatgcttacgatgaaggaatttcaacggaaggccgtttatcggaatatgcctcctcaacgtccatgattgtttttatttttctctcttccagcggagaacctttccgggaggacggcgttctgcctccatccccggaatcctttataggaggttgggccatgtggcgtggaaagctttatatgatattaaagttttcagagttgaagttgctgtagaatctgccctgcgtggcggtaaaccgcaagacgcaataatccgggtcggtcactccctccgggtagtacatggtgtcaccctccctccaaatcatttccttatagatgctgtcctccagcacttccatggagccgagaagcatgacgcctctgaagaatctccggtcacaaaagtaaatgcaggctttcgggttgtcttgatattgccttgcacgcatggaggaggtgttggtggtgaagtagaagaccttgatgccttcccttttccggggcggcagcatggctttcgtattcggatagccctgttcatcaatagagctgatgaatgccactttctgatggtcaatgagatttcccactgttgcttccgcgtttttcattgctgttttcctgattgggatggtaggccagaagagccgcattgtaaacttgtcttatttattcggactgtttctttaaacggtttttccgggaattgtttgatagcgtattctgccccgggatgtccgggcctgaaatgaggttcaaggggagtttgaccttgccgtctccaggatatgacgtaggataaatgagattttttctcttttttggaatctaatatcagtattgattatgtgtaaagaatgcggatgcggaggtgagcacacccatgaaagtcacggccacggcatggatgtccatgttcctgtgttggacgccaatgaccggctggcagagcgcaacagaggttttttcgcagcaaagaatcttctggttatcaatgttttttcttcccccgggtccggcaagacctctctgctgcagaagacggcggagatgctccgcggccgtgtgcgcatgggggtgatcgtgggggatctggcgacggataatgatgcggaacgcctgagccgtgcggatattcccgtggtgcagattacgacgggcaccatgtgtcatctggacgcccgcatgattgcagaagccatgaagaagatgcctctgaacgatcttgacgttctgattattgagaacgtgggcaatctggtttgcccggcttcctatgatctgggggaaggcatgcgcgtggtgttgctttccgtgacggaaggggaggacaagccgttgaagtatcctcccatgttccattccgcggatgtggccctggtgaccaagtccgatctggcggatgccgtggattttgaccgggacgccgccctggccgccctgaacaaggtagcccatcatgcgcacgtgattgagttgtcctccaagaccggagagggaatggacgcgtggtgcgacgagattgtggaacgcgcgcgccgcgtccgggaaggcaggatccagcaccatggccatcaccaccattgaacaggccgctgcggcgttgaagtttgagatagccggcatcgtccagggggtcggtttccgtccccatgtgtaccgtttggctgtgcggcacggattgaaggggttcgtgcgcaatacggagtccggcgtggaaatccatgtggaggggaagcccggcgctccggaacgtttttttgccgcgctgatggatactttgccggagcacgcccgcgtgtatggcgtggagcagaccgtgtgcgagcctgccgggtttgaagagttccgcattgtggaaagcgattctactcccggcggcgttccgatgatgctgccggacctggccccgtgtccggagtgcctgaaggagatgcgcgaccccgcctcccgacggtatcattacccgtttaccaattgcacgcactgcggcccccgctattccattattgaggagatgccgtatgaccgtgcgggcaccagcatgaagaagttccagatgtgcccggagtgcctgagggagtaccgggatgtggaggacaggcgtttccatgcccagcccataggctgcccgtcgtgcggcccttccatgaaggtgctgttttcagatggttccgaactggggttcggccacgggtttgacactcccgcggaacaggtggcgtgggtgctggcggacggcctgatcgtggctctgctgggcgtgggcggctttcaactgctggcggacgcttcttcggaagccgccgtcaggcgtctccgcaggctgaaggagcgggatgccaagccctttgccgtgatggtgccggatgtggacgcggcggggaagctgtgccgtttgtcggaggaggagaagcgcctgctggcttctccggcggcccccatcgtactggctcccggaaggaaggatgtggacctggctccttccgtgtgcatgttcagccgttttgtgggggtgatgcttccgtcctccccccttcatgccctgctgatggatgtatggagaaagcccctggtggtgaccagcggcaatctgagcggggagcccctgtgcatttccgtggaggaaggcttgcagaaactgggccatgtggcggatgtgttttttgtgcatgaccgtccggtcgtgcggcccgtggatgattccgtggtccgcgtcatggacggaagggccatgatggtgcgccgtgcccgcgggtatgctccgcggcccgtgtggcgcacgtctgcagaagctcccgacgttcttgcgctgggctccgggttgaagaataccgtttgctggctgaagaacggcgtggccgtcatgagccagcatctgggcgatcttgacagcgcggcttccctgaacgcgtttgaacggacggtggagacgctggggcgcacgctgggtgctgtgccgcaggtgattgccgtggacgcccatccggacggcccgtcgtttaccctgggcaggcgtctggcgcgggcatggaatgtggaagtcgttccggtgcagcatcatcaggcccatgttctggcctgtgccgtggagaatgagacgccgttgcccgccctgggcgcggcctgggacggcacgggattcggcacggacgggacggtatggggcggagagttttttgtgatggaggaggaaggcgctccccgcagagtggcgcggctcaggccgtttttgctgcccgggggggatgaagcggtccgggaacctgcccggtgcgcctgttccctggcgcggcagatggcgccgtggcgcacggatgggcttgaacaacgtctgcagggtggaatgaccttgcagaagcgggaagccctggaggcgatgatggcccgtaatattcaagctcccgccacttcatccatggggcgcctgtttgacgccatggctttctggtgcggctttgacggcgtggcgggatgcgaagggcatgccgccatgatgctggagtcatgggctgcggcggtttccggggaagaaatgccgggggaaccgtatgaatgggtcatgcatgaggagggcggcctgctggaactggattggcgcccgatgctgaaagccgtggacgatgacctgctgagaggcgtttcccgcggctgcatcgcccggaagtttcatgagagcctggtgaacctggcttttgacgtggcggagcgtttctcattggacaggctggtgctgggcggcggatgttttcagaatgcctttttgcttgaaggcctggcgggaatggcacagtctagaaggtgccagttgtccctgccgcagcgggtgccgtgcaatgacgggggaatttccctggggcaggctgcggcagtcgtgcgccaatggaaaggataataatatgtgtttggctgttcccggaaagatcgtgagcattaatgagacggacccgctgttcaggctgggagtggttgatttcggcggcgtgacccgtgaagtgaacctggcctgcgtgccggaggccgtcctgggggattacgttattgttcatgtagggatggccctgagcgtgctggataaggagaccgcgcttcaaacccgtagggaaatgcgggagatcgtggagaataccgatcccgtgtaaggggagggtcgtttgccggattgaacatttttaatggcttatgcaggaggaagttcagcagttgcttgaggagctgcgccatgccgtgacgcgtccgtgggcggtgatggaggtgtgcgggggacagacgcatgcgattgcctccctggggcttgaggagctgcttcctcctgggcttcgtctgattcacggccccggctgtccggtttgcgttacttcggtggatttgattgaccaggccgtggagttaagcctgcggcccggcgtggttttgtgcagctacggggatatgatgcgggtgccgggctcccgcggagatttgttttccgccaaggctcgcggcggggacgtgcttttaatgtattcaccgctggaggcggttgctttcgctgggagccatccggaagcggaagtggtatttttcgccgtaggatttgagacgactgctccggccacggctcttgccatgcagcaggcccgcgcgctgggttacgccaatttttccgtgctctgtgcccatgtgcaggttccccccgcactggaatggctgatggatcaggacgagggaaggccggacgcctttctggcccccggccatgtctgcgccatcatgggggaggaggattacggccgtttggccgctcgttaccggacgcccatggcggtgacggggtttgaggctccggacctgctccgcggcatcctgatgtgcgtccgccagttggagaacggggattgcacggttcagaatgcctacgggcgctatgtgaagccggaggggaacagggcggcgcaggaaaggatgaaagaggtttttgagccggaagaccgccattggcgcggcctgggcctgattcccggcggcggcatgaggctgcgccgggagtgggagggcatggatgccgccctgcgtttcgaatgcggaaaaagcgcccatggcgcggatgaagcttccggatgcctggccggccaggtgctgagggggctgattcgtcctgcggagtgcccgtttttcggcacgtcctgtacgccgctggctcccctgggcgcgcccatggtgtctggggaaggggcctgcgccgcctattaccgttataaaagaagttgattccatgtttgaatgtcctgttccggaacctgtttccgaccgtatccagatggcccacggcggcggaggccgtctgatgaatgacctgatccgttccgtctttctgaatgcgttcggcactccctccggcggcgtgcagaatgatgcggccgttctggattttccgccggggcggctggcgatgaccacggatagctttgtggtgcagcctctggagtttccgggagggagcatcggttccctggcggtgcacggcacggtgaatgatctcgccatgggcggcgcggacccgttgtacttgacggcaggctttatcctggaagaagggcttccgctggaggcgctgaaccgcgtggtgcaggatatggcggcggcggcgcgcgcggcgggcgtccgcatcgtgacgggagatacaaaagtggtggagcgcggaaagggtgacggcatttatattaataccgccggggcgggcgtggtgcgccatgggttggaaatcagcccttcttccgtccgtccgggggattccgtgctggtcagcggtgatctggggaggcacggcatgacgatcatgagcctgcgggccgggttgtccttcggggagggactggaaagtgattccgccccgctgcatgaatccgtggctgccgtcgtccgggccggaatccccgtgcattgcctgcgtgacgtgacccgtggcgggttaaccgccacgctctcggaaattgcggagtcctccggcctgacggtgaaactggatgaagtgtccattcccgtgcgggaggatgtcagagcagcctgcggcctgctggggctggaccctcttcaagtggcctgtgaaggccgttatctggctattcttccccgggagcatgaggaagaggccctgcgcctgatgcgcggctgcggcgtgtccgccggggcctgcgcgataggccgtgtggaagagtttggaacggcgcccctgctgatgacggggcggctgggggtggaacgggtgctgggcatgccttccgggatgcagctgccccgcatttgctgatgcttcccgcggtttcctccggcgttgcatttccggctttttggcagggaagcggttggggccgcctccctgccggtctggcatttcatagggatttgccggagcggctgcgtgtacttccggagaagctacagccggcttggtattgggggagttggttgttggaagatggtcaggagagttccgcgtttccggctccggcgtccggcagcgtctttaatgccgctttggcctgggtatggtcctgggaggccgccttttccagccattccctggcggtggccaggttcttttccacgccgaagccgtgctggtagatgatgcccaggttgtattgttcggaggcatagccggctctggctgcccgaaggttcctgttctgccattccctggcttcagcttcggtgaaatcctggttcttgcagaattgttcccatgtttttccgaatttcatggcagcccgcgcaaatcccatcagggccgcttttttagtgtgttcatccgccaggctcgcgttcttttccacgccggcgggtcccagccggtacaggtaggccagtccccagtatccgttggggctgcccaggtctgcggctttctggaagagctggagcgcgtcctgatattttttatgggacatggcgaacaccgcattggccaggaagcgttccgccttggtgaattcgtaaaattcgggaatggcggcccattcggatttgagtttgtccctgtcctttttggacttgggcggcatgccggcaggcggggaaatccggaaaacgggaatgtagccggaggcccccatgttggccaggccggccatcaggaagcagcccggctgaatgcgccacatgtgcatgtacagcacgcgttccgcgggcagggactccttctcaatccagtccggcagattcatgggcgggccatagaggcccgtcagcccgttcagcatgcgcttgtacagggatttcaggcgcgtatcgtattcgtccttgcctgccttggtgctggagtaaaaggagacggctctcaggcctccatccttgttgtactcaaaatgaagtgaaaagaaaaggccgccaatgggctttttcgttttgtaggcgccgttcaatccagtgcggctcaggtaggcgtccgttcccggaccttccagggatttgcaggctttcagggaactcagaagctgggcttcctgcaagcctgtttccagagggccgtaaagcggcgaggcggtacagcaggcggatgcataaagcatggctgcatagcgatagcaatctatcaatttcattgggggaatggggtaggggatgggggtcggttgtttcaatagcgaattaggaatccggatgaaactggccgacagcgctaaaataagatgaacaatcattatattcaagtatttatgctttattctagacgaaagcatattttataaaggctttcgtctagaataaagcataaatactggaatataatgatttggagaatcaggcttgatatttaaaactgtaggtattgtcgccggattcctaatccggggtgtttaaagcaggttgaaggataatatgcaagagtatcaggagcaatgaagtagataaccggctgcggtttccggaccgggaaaaggcagagataagcatccggcgttccgccacgttttcccggctttcagaacatgggaatcattattatttttattaaaaatctttctaaatattccttcatttccgttttatgtatcccgtatgcatgcattttggcggattataaatccggctgtcgggaaggaataatttttttaataaataatagaaacattatcaatggttaataagaatatcagatttcacggcctttggattccattgtgttttttcccgtcctggatacgatgaaaatcattttttctaaaaaaatttggttgacggcggatttataatgcgcggatgaccgcatgtagtttcagagcgtctgatattcaatgattcgtctgtttttttacggaaatgtgcggttttggcggcggcaccttccaaacagggagtgggggaggccgcctcctctgttcggtttcccgtgcaggaaaagcgggggggacatgccggaatctgtccggcacggttgtttctcctgctggggacggggacggatgacagcagcctgtgacggtttcgtttccctcctcagcttgcctgggaaggcctttctgcccatggtgccgccgcatgagaattgatgtggcaacggatacgtatgaacctgacgtgaatggagtggccctgacgctggagcggctggtccgggggcttcggacgcgggggcatctggtgcatgtgttgagggcttccgggagggacggagcttccgttcccggagagacggccatgccgtctctctccctccccatgtatcatgaggtgaaaatagggctgccttccgcagaaaggttccgctccagatggatgaagaagaggccggatgtggtttatgttgccacggaaagccccatgggggcctccgccgtgaaggccgctcgcgctctggagattcccgtggtgatgggattccacaccaattttcaccagtacatgaaggattaccatttctccaggctggaaaccgccgccgtgaattacctgcgcaagctccacaaccgggcagggatgacggtggtgcccacggaggagatgcgccgcgcgctggaggggttgggatttgaacgcctctccgtaatggggcgcggggtggatgccgccttgtttgaccctgccaggagggatgccggcctgcgccagtcatggggcgcctggcgggatgaagtggtgttcggcgtggtggggcgtctggcccgggagaagaacctggtgacggccctgggactgtacacgcgcctgcagcgggagttcccggcctgcggcatgaagatggtcgtggtgggggacggtcccatgatgagcagcctgcgcagtgagtttccggacgccgtgttttgcggaatgcgcagcggggaggacctcgcgcgccattacgccgccatggacgtgctgctcttcgccagtgagacggagaccttcgggaacgttctgctggaagggatggccagcggcctggctacggtcagctaccggtacgccgcttctgcggatgtggtgctggacggcatcaacggccttcaggcggagaagggggacgcggagggtttttactccgccatgcgccgtctgctggaggacagggggatgatccggagactcggcgaacaggcccgcaggaccgtgcgcgccagagcgtgggattccatccatgacaggtttgaagaactgctggcctccgtggcgcgggaggagaatggaaccggctacgcccgccccccgcgggatgcggtgctggaatgccgcacggtctttttgtcagacctccatctgggcacgaaggattgcaaggcggacgaatgccggaggttcctgaagcatgtccgtgcggaaaaaatagttctggtaggggatattgtggacgcctgggccctctcccgcggcagccgctggcgcaggcggcatacgcgcctgatccgcaccctgctgaaaaagatggagcaggaggatgtggaagtgctgtacctgcgcgggaaccacgacgatattctggaaaaattccttccctttcatctgggcggcctgaaaatggccaaggagtacgtgcaccgggcggcggacggcaggcgttacctgtgcgtgcacggagacggttttgacgccatctccaccaaccaccggtggctggcgatgctcggctccctgggctacgacgttctgctgacggtcaaccggctttacaataaataccgcgcctggcggggcagggaatattattccgtctcccgcgccatcaagagccgcgtgaaatccgccgtcaatttcattgggaaatatgaggagcagctccagaatctggcggtgaaaaggcagtgtgacggtatcattgccgggcatgtgcatcatccggcggataccatggtgggggaggtgcggtacctgaattgcggggactgggtggaaaccatgagcgcggtggtggaatacggggacggccgcatggaaacgctgctttacaaggatttcatgaaacgcctggcttacggcaaatgcggaaccggagccggagcggaagcttcctcctgcaaggaggcttcgtgacgggcgccggggacaggctgtccggagggtgtgggacaaaatggccgcgtgtgacattttgtctctttttggtgtgacaatatgtcccattgctgctcggcaggaaaaagagcggacgaaatgatgcgatgttataatacgatgaatttatgttgtttatgtttatttttcaacagggcttacaaggctggcatgccatttgcagaaagaaaggcaagaacatgagtttgcctgcatgacacttcaggtcatggggaaatcaaatctcaacgaaatccatttaaaacaatctaagataacgatatggctaaaatattaggaatcgacttgggcacgaccaactcgtgcatggctgtgatggaaggcggtcagggtaccgtacttgaaaacagcgaaggtgcgcgcaccactccctccattgttgccttcaccaagagcggtgaacgcctcgtggggcaggccgccaaacgtcaggcggtgaccaatccgaaaaacaccgtgttttcctccaagcgcctcatcggccgcaagtacagcgagctgacggaagaagataagaaggtgccttatgaaattgtggaggcccacaacggggacgcctatatccgcgtggacgtaggcggggaaaagaagactttttctccccaggaaatcgcctccatggtcctggccaagctgaaggccgacgcggaatccaagctgggtgagacgatcacggaagccgtgattactgttcccgcctatttcaatgacgcccagcgcaacgcgaccaaggccgccggtgaaatcgccggcttgaaggtgcgccgcatcatcaatgaaccgacggctgctgccctggcttacggcctggacaagaagtccaatgaaaacattgccgtgtacgacctcggcggcggcaccttcgatatttccgtgctggaaatcggtgacggcgtgtttgaagtgaaggcttccgacggcgacacccacttgggcggcgacgactgggacaacgcgatcatcacctggatcatggacgagttcaagaaggactccggcatggatctttccaaccagccggacgccatccagcgcatcaaggaagaagctgaaaaggccaagatcgccctttcctccacccagagctatgacatcagcctgccgttcatcacggcggacgcttccggacccaagcacatccagctgacgctgagccgtcccaagctggaacagctcacggaagacctgctggaccgtacccgcaagcccgtgctggactgcatcgccgcctccggcctgaagaccggggacattgacgaactggtgctggtgggcggcatgacccgcatgcccgccgttcaggaaatggcccatacgctggctggcaaggaaccccacaagggcgtgaacccggatgaagtggtggccgtaggcgccgctatccagggcggcgtgctccagggggacgtcaacgatgtgcttctgctggacgtgaccccgctgaccctgtccattgaaacgatgggcggcatcgctacgccgatgatcgagcgcaacacgaccattccggtgcgcaagagccaggtgttctccaccgccgcggacaaccagcccgccgtggacatccgcatctgccagggtgaacgcaagatgtttgaggacaacaagcttctcggcaacttcaagctggacggcatctccgccgctccgcgcggcgtgccgcagattgaagtgacctttgacattgacgccaacggcattctgcacgtctccgccaaggacaagggcaccggcaaggaacagaagatttccatccagggctccagcggcctttccaaggatgaaatcgaacgcgccaagcgtgatgcggaagcccatgcggaagaagacaagaagcgggctgaggaaattgacaccgtcaaccaggcggactccctctgcttctccgtggaacgccagctcaaggacatgggggacaagattcccgcagacctcaagcgcgagatcgaagacaaggtgatgcacctcaaggaagccatctccaaaaaggaatacaccgcgatcaaggccgggaaggaagacctggaatcccgtctggaagccctttacaaggcagcggaagccgcccagcagtccgccggtgcagccggccccatgccgggagccgctccggaggaagaagcttccgacggcccccgcaaggcgaaaggccgcgtggtggacgccgaaatcgtcgacgacgacaaataagcaaccccttcccgccggaggggggagcaacttcccctccggcggaacattacatccatatattcatctataacaacacaaaaacaacatactatggcaaacatcaaacccctaggacaacgtgtgctggtcaagcgcattgaagctgaaaccaagacggccggcggcctgttcctgccggacaccgccaaggaaaaaccccaggaagccgaagtgatctccgtaggcaccggcggccgcgatgacaagggcgccttgattgaattcaccgtgaagccgggcgaccacgttcttatttccaagtacggcggcacggaaatcaagctggacggagaagactacctcatcctgtctgaaaacgacattctggccatcattggctaaatcacacgacacactcactcaacatcattttaaaataacctgatattatggctaaacaaatccaatttgacgaaaccgcccgccaggctctgctccgcggcgtggaacagattgccaaggctgtcaagagcacgctggggcctgccggccgcaacgtggtgatcgacaagaaattcggttcccccctcatcaccaaggacggcgtgaccgtcgccaaggaaatcgaactggaagacccgtttgaaaacatgggcgcccagcttgtccgggaagtctcctccaagaccaacgacgtggccggggacggcaccaccaccgccaccgtgctggctgaaagcatttaccgcgaaggcctgcgcaacgtcaccgccggcgccaaccccatctccctccagaggggcatcatgaaggccgcggacgccgtggtggaagaactcaagaagatcagcaagcctgttgactccagcaaggaagtggcccaggttgccaccgtttccgccaactgggacgccgaaatcggccacatcatcgcggaagccatggacaaggtgggcaaggacggcaccattaccgtggaagaagccaagggcattgaaaccacgctggacgtggtggaaggcatgcagttcgacaagggctacctgtccccctacttcgtgaccaacgcggaaacgatggaagcggtgctggaaaacccttacatcctcatccacgaaaagaagatcaacaacctgaaggacttccttccgctgcttgaaaaagtggccaagagcggccgtcccttcctggtcatcgcggaagacattgaaggcgaagctctcgctaccctggtggtcaaccgcctgcgcggcgtgctgaacatctgcgcggttaaggctcccggcttcggcgaccgccgcaaggccatgatggaagacattgccatcctgaccggcggcaagtgcatcacggaagacctgggcatcaagctggaaaacgtgggcattgaagacctcggccaggccaagcgcgtggtcgtctccaaggatgaaaccgtcatcgtggaaggcgccggcaagtctgcggacattgaaggccgcatctcccagatccgccaccagatcaaggacaccacgtccgactacgaccgtgaaaaactccaggaacgcctggccaagctggccggcggcgtggccgtcatccatgtgggtgccgctacggaaacggaaatgaaggaaaagaaggcccgtgtggacgacgccctgcacgccacccgcgctgcggtggaagaaggcatcgttcccggcggcggcgtggccctgatccgcgcccagaaagccattgacaccctcaagctggaaggcgacgaggaaaccggcgctcaaatcgtctatcgtgcggtggaagctccgctccgccaactggccagcaatgccggccgtgaaggcgccctcatcgtcgccaaggtgaaggggatgaagaaagcggccgacggctacaacgtagccacggacaaatatgaagacctgctcaccgctggtgtggtggacccgaccaaggtaacccgttccgccctgcagaacgcggcttccatcgccggcctgctgcttaccacggaatgcgtcattgccgacaagcccgagaagaagggctgcggatgcggctccggcgctcccgacatgggcggcatgggaggaatgggcggcatgggcatgatgtaagcccccgtccgtttctgcgagacacggcaatcgacttcaaggctccccggttttccggggggcctttttgttttgtatggagggcgccggaaccttccgtttttttgcttttcccgtatgggaaacgcttctctttcggaaggcggcagccgccactccgcgggaagggatttcaggaagatgggccgtggctgccggagaaccggaggaaaaccaggctccggaagtgcccggaagaaacggaagatttcacgggaagcaggtgtagcgctatggtttttattgaaaatcatattgttgcatcaatgtgacggaatgttcacgttttaaaacgggcgtgcggaagcggcctcctgtaatagagggccgtttattacgcttatggacccaatctattacttcatcatagggctgattctggtgctctcctgctttgacctcgtcgtcggggtctccaatgacgccgccaacttcctgaactccgccgtcggttccaaggccgcgccgcgcaggacgatcatactggtggccgccctgggcatcatcatcggctccctgttctccagcggcatgatggaaatcgccagaagcggcgtattcatgccggcccagttcaccttccatgacatcatgctgatattcctggcggtgatgctgacggacgtgattctgctggacgtcttcaacaccttcggtcttcccacctccaccacggtttccatcgtctttgaactgctgggcggcgccgtggcggttgccctgttcaaaatctggtccgcagagccgggcgcagcgcaggaactgtccagctacatcaactcctccaaggcgctggcgatcatctccggcatcttctcctccgtcttcgtcgccttcatttgcgggataacggtcatgtggatttcccgcctcatcttctccttcaactacaaaaaatcattcaaatacctgggggccgtctggtgcggcttggccctgacggccatcacctacttcgccatcttcaaggggctgaaaggcagtacgctggtcaccaaggacatgatccgccacctggacgcccacatctggctgtacgtatgctgcagcctggtattctggaccgtcctgatggccgttctccagaacatttgcaaaatcaacatcctgaaaatatccgtcctggcgggcaccatggccctggcgctctcctttgccggaaacgacctggtcaacttcatcggcgttttcatggcggggcagtcctccatggagatagcgtccgccgctgcggcgcagggcgcggacctttccaccctcaccatgggcggcctcatggtccccgtcacggcggactggcgctacctgctgggcgcgggcgtcatcatggtgctggccctcatgttctccaaaaaggcgcagaccgtcacggatacggaggtcaacctggcgaggcagggcgggggcgtggagcggttcggctccgtccccccggcccgcatggccgtgcgctatgcgttgaacgcctcccgcgcggtggaaaaaatcatgcccgcctgcgtgggaagattcattgaaaaacgtttccagcccgtgccggacggcccggataacggggcctcctttgacctgatccgcgcttccgtgaatttgacggtcgccgccctgctgatctccctggctacgtccctccggcttcctctttccaccacgtatgtgacgttcatggtggcgatgggttcctccctggcggacaaagcctggggacgggacagcgccgtgtaccgcatcacgggggtgattacggtaatttccgggtggttctttacggcctttgccgcattcaccatgtgctgcatggtggcggcgtgcatcgtttacggaggcctgttcggcattgtcgccatgtgcgccctggctgccttcctgctgctgaaaagctccaggctccataaaaaaagaacccaggacgcggcgctggcgaaggtggccaattaccgggatccggcctgcgccgcccgctacaatgaagaaatcattgagctgatgaaacgcatggcggaaatctatgaaatgaacctggaagccctgaacgtggaggaccggaagcggctgaaaaagctccggaaggaagcgcgcggcatccgccgctccctgagcgaccggatggcgatggaagtcatgcccgtcgtccgggaacttccggatgaagaggcggaccgcggcaagcgttacgtgcagatggtggaatacgccacctccgtctttgaatccctctccaacatcaccacggccagccatgcctacatagacaacaaccatgaagggctggacatggacaggatagagcacttgagggggatgaacaaccgcgtttcctccctgtacccccgtttccgggaaatgatggaaagcaacgactatgccgggctggaccaatgcctggccggcatggacgcgctggatgaggaatttgcggaggcggtcaagcagcagatcatcctgcgggcggaggacgtatccgacatgcggcgggcgctcctctacctcaacctccttaatgaaacccgcacgatgatccgcaaggttcttcttttggcgaaaattcagcggaaatttgttcttggctggtaaaggcctgtaattcacggctgcgccggaggcggctgcttccggcgcagcggaagagggagcggcattttcttatccggaaattctcccggaatacccgggaagcgggaatggggaaaatttattttccggaaagcgaaagcctccggaatgctcgtctttttaaagtgtaaagaaaaaccgcaagcattgaggaacaattgcttgcggtataaaagtggtacgggcgatgggaatcgaacccacgtctcaagcttgggaagctcgcgtcctaccattgaacgacgcccgcatgaaatgcggatgcctatttagcggcagaaggcaggtatgtcaagaccacagaaaaatcgtgtcttcttttttgatattttaacacagaaatgaaaaaaaacttgtcttacccccgaggcttgaacataatgcctctgttgtgcgggtatagcttaatggtaaagctccagccttccaagctgatcacacgggttcgattcccgttacccgctccattttttcattaaattcacctgctagatacttcctttatgaaagccaggttcatgacaaagacggcgctcagtgcgctggcacttgcgtttgcgggcgccctccccggtgtggctcagcaaactgcttctccggcagccgttccggctgttaataaggttaaagcctctgctgttgaaaaggcttttatgaatcaaatggcaggtgttgtccaggccagcctgaaggccggcgccctggatatgaaagccgtgaccgagattctgaacgccgctgtcaaggccggcgtgtctgaccaggtgatgggctccctggtatccatggccgcaggcgctttcccgggcagcgcgcccgctgttgcttccgccgccgttaaaagctatggaacccaggtaacggaagccaacgtacgcaacgtgattgcctctgctgtggctgtgcagccccacccgtatgcgtccgtctctcccatctcggaagcggttacgaaagctctgggcagctccatggtagccaatgccgttcccggcattgccgtgggcgtggcggcccagacgcctgacaatcctctgcaaggggtgaccactcagaccagcggtctggtgaggcctggtgaagaggcatccggaggggccctggtcctgccgggcggtcttcccgtgggcggctctgctacaagccccgctcccatctccaatcctgccggaaattaacccgatccatttatcaatagcatgaagagtcttttttatctctccttgatggctgccggcatgcttgccgtccatgccaacgggcagtccctgtacaccctggcaggaccggtcggtctggaagaatcccttcccctgaagtggacattcaatctggccggcggttatgacgacaacgtcaacgcttccaactatgaccagcaggaagccgctttcatcagcacggacatcggcgcctccctggccaactacgattccgtgacccagtactccttctccgccaagcttgggggtatcttttacctgaaggaccttgagggagagacgaacgaatcactttccaactccacgctctccgccaacctttcccacagctttgaccagaccctgcgctacaacggcagcgtgtcctttgcgtggcagccggaacccaactattccaacggcattgccaacgctcgccgggacggcgactacatttacgtgtacgtctccagctccgtgagcaaggcatggacctcccgctactccaccacgctgggcgccaacttctccatgatcaactatcaggaggactccgccaagacggacaaccgcgactatgtgggcatggacttcaccaaccgctacaagtggacggaacgcctggctatttccctgagctggaacggttcctactgcgaccgcgaatacggcaacaacgaattctccaacttcgtcatggccggcgctgaatacgctgtggctgaaaatacgtccgccacgctccgcgtaggtccccagttcaaatatgtggaaagctacggtaccaggacctatccttccgcagaattcggtttgaaccaccgcatgagcgaccgcttcatgatcggcacgttcatccgctactccaacgaagcgacgaatacgtacattccctacagcggtgccagttactattccaatgaaacgtggcgcttcggcgtgaacagcacgctgaaactgacgcaccgcgccagcctgaactgcggcgtaaacctgatttccagcgagtacagccgcctgagctccggcagcaacagtgatacgtctgacctgaccttcaatgctacggccggcatcaagctgctgctgactaatgcgctggctcttacggcccagtactcctacaccaacggttcctacggcggctataactacccgatgccctcctacaaccgcaacgtgttctccttcggcgtgaattacagcttctaagtcttgactgaccattaatgtccttactcctctaattgcgaatgttcattcacaattagaggagtttttatcttactacctcactatctttcatgaatgcccaggatcagcagaacagtgatcgcatcgtacgcaacattgactatttgcaagttttaaaaaatcgctggaaagaagtcttcctggtcttccttctggtgctggtcatttccgtggtagtgactttcctgatgccgccctcctaccgggcgacgagccagttccagatcaagctgcccaagcccgtaatggaaatcggccaggggggggacgtggtcgcctcctccaacgtgacggctaactacattcccatgcagtattccgtgctgacttccactgaagttctgaaggtggtgtccaggaagctgaatcttgccgcggaatggggcatgacggatgaaatggcggcatccaatctggccggcatgatcaaggtggctcccgtgcgtgcgacggacctggtggacgtcattgtctccggcccggatcccaaactggtgcagaacatcgccaagacggttcccgaggcttacaagcaggaccgtgaaatgcgtgaaaaccgcctggtggaaaccgccatcaaaagtttgaaggacgttctccgggaacaggaggataccgtcaatgaaaagatgatgtccctcaagaagctgattgcggaaagctcctaccttcccactacctggagaaacggtgaaaaccggagcactctgacggccggcatggaagaggaagacttccggaacgccaaatcccaggccatgcagtttgaaaaggatgaaaaggaactggcttcctacgtgcaggaactgcagcgtctgcctgacgacaagctgctggattacgtcatcagttccgacctgctgaatgcggaatccgtaggagccaaggccctgcgtgaaacctatgccgaattttccgacaagctcaaggagaaggaaaacctgaaagcccagaacatcggggccaggcaccccaagatgctggcgctgctggagacggaaaggattctgggagagaagctgaacaaggagctgatcgggctgcgctcctccctgaaaagcaagctggaaatggtttccgcaagccggaagcactggggggcgaccgtcgctcaaaaggaggaagctctccagaagcatgtcctgcaggttcccatgtatgaacaggccagccgtgattatgacgccgcgctggaccagctcaaggacctggattcccggtacaaggatgaaatcgcccgtctgcgcgttccccgtgaagcgattgaaatgtaccagcttccgacctatcctgccgctccctacaagccgaacgtgaccatcaacctggcggtgggcgccggggccgggctgcttctgggcatcgggctggccctgctgctggaattcatggacacttccgtgaagacgatggaggacgtggaacgggccctgcaggttccggtgctgggcattatccccaagaatgtgccgatccttcattcttccgatgtgatgggcccggacgcggaagcctaccgtattctgcgaacaaatatagaattcaataaaaagggattggaggaaatttccttgacctttgtttccggcagtgccggggaagggaagaccaccaccttgtgcaacctggcctatatctgcgcccagggcggctatgccaccctgatgattgacgccgacctgcgccgttccaagcttcaccggtattatgaactggacaatgaagtgggactgacctcctatctgctggaagactacccgctggaggaagtgattttccagacgcccattgaaaacctgtacgtgatgcctgcgggccccacgcccttcgacccgtcgggcgcgttgaattcccgcaaattcaatgaactgctccaggaagtgaagcagcgctttgacatcgtgctggtggactccccgcccatcctcggcgtcagtgattccgccgtcatcgtgagcgaggtggatatgacgctcatggtcgtccagccccgcaaactgccgctgaaagccctcctgaggcagaagcaggtgattgaatccgtaggcggcaacctggccggcgtggtgatgaataatgtggacatcacgtccgatcaccagtatcagtattacacgacttattactcctattattctgcggatggcggttcctccggcgagaatgcggacgcctcttccatgaagaaggccgagcgttccggaaaggccaaggagctggcggccacccagtcccatgatagtgaagatctgtactaacccattgctccatgaaaaaatacatttgttccctcctttgcctcttgctgggtgcggcggggctggcgtccgcccagtctccggacgccgtgcctgcgcagggcaccattgaaattcaggtgcgcggcattcctgcggatgacgctacggccatttccggccagtatctgctggatggcaacgggacgatacgcatgccccagcttccgccgggccacgacgtgctgcgcgtggtaggcaagacggcgcgccagattgaagatatgctgatggccgcctataagaaggcggaattgtacacggcccccacctttctggtgaaggtgcagagttcggacgcgcggctgacggagcacattgtgctggtgagcggcggcgtagccatgaagaaaaacgtcctgtggcggcgcggcatgacgcttctggaagcgattgtgggcgcgggcgacattacggactggggttcccggtacgtgcaggtgacgcgcggcggaaaaaccgtgacgtacgattacttctccatcaaggacagggcgattcccattcagcccaatgaccgcatcttcgttccccagcgcgggatttttgaagggcggcccgcgaagctcctgccctgaaacattcttttttcatgcccggctttccatagggaagccgggttttttattgccccggttcccggaaaatccatggaatgccggaaaaaacacgtgggccggcgtccgggatgggaacaggccgctggggagatggaacgcggaaggcctgtcatgaaatttcccaggcccttttctggaaatgggccgtgcatgcgtggaaccgtatggtagaatcatagcgggaaaaaagttttcccttgaaccgtacggcgccagtaaaaacgctggtggaaggggttttttccctgtgcccgtgaacctctgtattcaccggaacggaaggcctgcggggcggaaagagttgaggaacatgctgtttccgccgggggcgtaggcccttttcccgtgattggctgatacggcctccgggcatatattgcgatgaaatgagttcagtatgaatgtaaaaaacagaaaaacaaagaaaaatgttgaatattcttggactcaatgcatttttggaatcttccaaaaatgttagagtttcgtgcggaatgtctgcatggagcttcgcaatcccaatgtaaaaactcattaaccatgatataccattttaagaaaacattcatcggagtaggaggacgggaatacattaacaatcccaagctgagcttcccggaacatgtgaaaatccgccgtcggggaacgaatcccaaatccggccagccttatgcggaagcgggcagcgcgttcgtggaaacgtcctccattgcctcgcggctctgctgcagcgcgtccgccgcccgccagtacctgcaccgtcacggagcccgcttccgcgtggtccgcaagggtacgggttccctggccctgtactggcggcgtgcggatgtggaccggattctcgcccggcgggagcctgtacgccgccgcgtgccaccgtgctacatggacatggccgaggctatcgacatgctgggggtggtgcgcagctacatttacaggctcgtgaaaaaggggctgctgcgcgaataccggtgccggatgaagaccgcccgcggcctccgggtgcgctgtttttatcaccgggaggacctggagcatatcaggctgcacgtgctccagaaaagatgatggggccggtttccgcagatgcgtttttggcttgagcgcgggccggattgtgtcacgttatgggcatgatagcttttctgcgcggcacggtggcggaatcatatccccagcggttgattctggatgttcatggcgtggggtatgaggtgattgtgcccctctccacctttgacaggctgaaccctcttcccggcagggagctgacgctgaaaacctacctgcatgtccgggagaacatgcaggtgctctacggctttgccacggatgcggagcgggacattttcctgctgctgatcgaccgcgtttcaggcatcggccctgccacggccatcgccattcttggttccctgtccgtggagcagttcaagcaggcggtggtgagcggggacgtttccggcattgcgcgggccaagggcgtgggcaagaagacggcggaacgcattgtcctggagctgaaggacaaggtgggactggccgctacgtgggaggcccaggcgcagggcgccacctcccaggcagcgggggatgcggagctggcgttgattgcgctcgggttcaagcaggtggagtcccgcaaggcgatcgccgcccacctgaaagaccatccggacgcggatgcggacgaactgatccgcgccgccctgcgctccatgaactgaccggctcccccacccggggaccggctccgcaagcatttgacttccatgcgggagcatgcccgcgggcagggcttcctgcggtccgcgcaggcgcgggagcatactgccatgatgggggaacaatagtgttgacggctggttgaatcgtttttaaacttacggcgtccatggtacttaaataagtccgggactagtaattaatcaaatctgaagccctcaatcttatggccaaatatgctattaacggttttggacgtattggtcgcaacgtactgcgcgccatgtccaaggaagaacgcaacaaggttgttgccatcaatgacctgacccccattgaaatgatcgcccacctgctcaagtatgactccacgcagggcaagtttgacggtgaaatttccattgatggagaatatctggtcgttgacggtcacaagatcctcatcaccgtggaacgcgaccccgccaaccttccctggaagaagctgggcgtagacgtcgttctggaatccaccggcctgttcaccaagcgtgacgccgccaagaagcaccttgaagccggcgccaagaaggtgctcatttccgctccctccccggatcctgacctgaccttcgttctgggcatcaacgacagcgaatacgatcccgccaagcacgacatcgtttccaacgcttcctgcaccaccaactgcctcgctcccatggtgaaggtgctggacgacaagttcggcattgaaaagggcatgatgagcacgattcactcctacacgaacgaccagcgcatcctggaccttccccactccgatccccgccgcgcccgcgccgccgcgatcaacatcatcccgacgaccaccggcgccgccaaggccatcggcgaagtgatgccgaacctgaagggctccctgaacggcgcttccttccgcgtgccgaccccgaccggttccctgaccgacttcgtggccgttctcaagaagaacgtgaccgtggaagaagtgaacgccgccatgaaggaagccgctgaaggcccgctgaagggcattctggattactctgaagaagccctcgttctccaggacatcgtttccgacccccactcctgcatctttgactccggcttcacgtatgtggtcggcggcaacctggtgaaggtctgcggctggtacgacaacgaatggggctactccaaccgcgccgctgaagccatgaagaagctgggcgacagcgtgagctgcggctgctcctgcggcaagtaagttcttccgaacaacgcttgctcttcagttgcacgacaagtcttgccggttgcctgcttcaaccttccggttcctgaaccgggtttgtccaggcggccggggatttatccgggagggcagaaatgccctcccttttttattccattgaaccaaacaatataaaccgatatggctaaacttactgtacgtgaccttgatgccaagggaaaggaagtcctgatgcgcgtggatttcaacgtccccctcaaggatggggaaattaccaatgacgcccgcatcgtggccgccctccccaccatcaagttcctgctggaccagggcgcccgccttgtcctcacctcccatctgggccgtcccaagaacgaacccgatcccgctttttccctgaagcccgttgccgcccgcctttccgaactgctcggcaaggaagtgaaattcgttcccgccgccatcggcccggaagcggaagccgcccgcgccgccatgaaggacggcgacgtggtcctgctggaaaacgtccgcttctatcccggtgaaaagaagaacgatccggaatttgccaaggctcttctgggcaatgccacgctgttcgtgaacgacgcgttcggcaccgcccaccgcgcccacgcttccacggaaggggtgacgcattttgcggaaaagagcgccatgggcttcctgatcgaacgcgaactggaatacctggaaggcaagctggaaaacccggaaaagcccttcgtggtaatcatgggcggcgccaaggtgtccgacaagattgaagtgctttccaagctgatggaaaaggctgatacgttcctgatcgggggcgccatggccaacacgttcctggcggctgaagggtatgacctgggcgcttccaagattgaaggcgacaagctggatctggcccgtgaaatcctggcggaagccaaggccaagggcgtgaaattcctgcttcctgcggacgtgcgcgtagccatgaagtttgaagacggcgctgaaaccttctgcacggctcccttcgcggaaggcggcaaggtgccggaaggcggcatggccatcgacatcggcgacaaggctattgaagaattctccgccatcatcaaggacgccaagaccgttctgtggaacggcccgatgggcgtgtttgaaatggactgctttgccaagggcaccaaggaaattgcggaagccctggcggattcctccgccatctccatcgtgggcggcggcgattccgtgacggcggccaagaagttcaaggtccaggacaagctttccttctgctctacgggcggcggcgcttccctggaactgctggaaggcaaggtgcttcccggcgtgggagccctgaccgacaagtgcggctgctgctgccagaagtaaccgttcacggccggcggatcgctttccgcatggtgccttgaatgaaccttttcattccccgtgcccgtctccgggtgcggggatttttttgctccctgctgacgcggcggaaactgcggaagtttgccggctcccgcggtttaaggaaaacccgttcgtgctccggtggctgccggttccggagagggggatgcagggaaaggcggcacagtccttttttgggcttgctctgcgtgtggcccgcgctaggctggacatgtatgaaaatgctgcgcagcttcctggccgtgttcctgttgtgctctcccgcgcttgcggcggacgcctccgttgcggggaagaaggagcatggggggtatccggcccggtacatgcttctggaatcctcgtcccgcaacagccagagcctgtctacgcccgtggccgcgtatgtgaatgacgaaggcgcggaagtggcgcttatcggggccattcatgtggcggaggctgattattatgcctggctgaacaagctgttcggcagttatgacgtgctgctgtttgaaatgatcggcggggaggggctccggagggaggaggagctccgccgtaaaatagaccgcaataagcctatgggagggctgacgctggaggaggcgcgggaatggaaccggatggtggagtggaggaagagagccgcccttgaggaaaagtcttttttgctggggctgctgggaagcgcgtaccgggaattgagcgccgcgctgggccttcaaacccagcatcagggcattgattattccgcgccccattttatccatgcggacatgacgctggcggaattccggcaggcgcaggccagtaagggagaaaacttcgccagcctgatgcttaaatccatgctgtcctccctggtggagaagcccggggcgtaccagccgaatgaattcggcatgatggtggatttgcttgccgggaacaaggcggggctgaagaatgaactgatgcgcatttttgcccatgctccgaatgatttggaggataccgtgattctggaaggccggaattccaagtgcatggaagtatttgaccaatggcgcggcaagggcgttcgcaggataggcattttttatggcgcggcccatcttcccggcctgcacggagctcttctggaacgcggctaccgcctccgggacgtgcagtggctcccggcgtggagcaccatggagaaggctggccaggactgacccttttgccgtcttttccggtctttccgcgggtaatgaagttggtgactgccggaggccgtaaatgatgggaattctccctttccggaaaggccgcttcaaatggaaagggagaagaggaaaatagcctcttcccctttcctgatgaactcccgttgagcagacggaagggaacgctactttccggcggggaccaggcgggcaatgccgccgcccttgacgcgcatggtgaaggaaagggtgctcccggaatggagttcccggttttccaccttccagccgtcgttcttttccggcaggtcgcggaggatggtggcccggtacgcggtgttcctgttcaggaagtccaggggaatggaaacggtgcgttcccgtccgtccccgttcatcagggcaatgtaccactggtccccggaacgccgggcaaaggcggcgcattccccgatggcggacggcggcaggacgatggtctcatcccatacggagggaatgttccggacggcttcccgttccggggagcctttcgggaaggcggcttccatgtctgcggggttggatacccagtggaggactggggacgtataaatgatattggccgccatctggaggggccaggaagagccgcgcagcttgggcccgtggccgaagtagccgccagtgaaatcggcgtggccggagaccagccgggtgaagggcagtgcgcagtagtgccgtccgccgatggcggcccagatgttctgttccccgccgtagatgccttcccggctcatttcatgcggccaggagcgttcttcccccgtgggggtattggcgccgtgaaagttgaccatgagcttgtttttagccaggttttccgcgacggcgtcataaaaggccaggcgttcccgggaggcggaatccatgaaatctatcttgattcccttgatgcccgttttggcaaggctgctgaaaaagctgcgcatgctttcccagtcgttggcggggttgttgacgtctgaccagcgcacccatacccagatgcctacttgtttgccggcggcgtagctggccagttgagccaccttgtccatgctttccggcacggttttgccccatttcttccatccttcgtcaacgaggtggtattcccagccgaattcggaggccatgtcgacaaaggcgtactggtcctcttcacggacgtttccgcggtcccaccaggtccaggtggagcggcccggcttgatccagggcgttttggctccttccggaaaaaggttcttgtccggttccggagccagggaagggatgacgtcgttccggaccaggccgttgaggtcgtcgttcaccaggatgacccgccagggcatctctgcggaagagggggcggaaaagccttccgggtcctggaaatataccgtcctgcatgcgccgtcctgaagggagaatttaatgccgctccactgcctgttgaaattggcggcttcctggatgagggcgaagcctccgcccggcagttccgccgcaaccggcatggtgcggacatggctgcggggattgccggggtctttcttgaaatcggctattctggaaggagaccagactccctcgcagggacccagtgcggaagcggcgtcctgggtccacaggacggctttttccgggaaggcgaacgacgttttttcttccccgatgttcagcacgggcgctttctgcacgtcttccgtccactcgtagcggaaggcgactccgttgttgaaaacgcgggcgcggaggcggaggccggaattatccccggaaaccacgtattcgttgaaatggacggaagcggaggggtatttgccgcgcgtttcaaaggtgtcgtggacgttgtccttcacttttttcacgctccatcccgtaatgcctccggcaaggtccttgccgttcaccacgatgcccaggccggagggctccagaaccgtcctgtttccctttttcagggaatgggcggcccggttatccgcgtggagcatccaggacagacggccgtccggggattgcagagaggcatgcaattctcccgcctgtccggaaccgggcaggaggcatcctgccatattgctgaaaataatgagagattttacaatcatatctttgtcagaatacgtccatcttggcccgtttattgcaaaagtatgttttggaagggcggcagccagcgcatctactttccggaatgggggaaaaggccctccctgcgtgaaggccgggtggttctccgttaaatccgtggaagccgtgagctgttcatgaagatgaaaaatggcggatgtcttgtttcccgtgcaagaggttatggagaaataaccgacccggtgagcggcaaaagaataatctttacaaattaggtggaaaagataaaagtaatttcctgatcagatattaggatggagagttgcggctcaaatagtgttcccgattttcaccatgcggcagttccgggaaaagatgctcatttgaataatgtttccgtgcatggatccaaattgacacctccctcttcctggaacgagttttccgtttattccaaagaactcccggacggagcgacgttggagcattataaaatattgaaggtgctgggaagcggcggattcggcattacctatctggtccgggacttgatgctgaagaggaaagtggttttaaaagagaattttccttcttcctatgcttacagagatccgtttacggggcgcgtggttcccaataatgagcatgacgccgagtatttcaagtggaccctttccaactttttgaatgaagcccgcattcttgcgaggctggattctccaggtattgtccgggttctttccgtttttgagtgcaacggcacggcttatttttccatggattatgttcaggggcttcctctggattacctgggagaacagcagctgcttgccggaaactgttattcggaagccaagttgaagggattgctgatgcacatcctccagattttggattaccttcataaaaaaggcatctgccacagggacatcaaaccgggaaatatattgcttacacaggagggaactcccgttttcgtggatttcggcgcgtcgcgccacatggagagcacccatacccagactgtcctgacgactcatggcttttcttctccggaacaggctctcggcaggaaaaacacgggaccttggagcgacatttattccctgggcgctacgttctattccctgctgaaggggggtgcgccccccagaggagaggagcggctgatccacgataccatacagcctttggcattgtccgcgcccttgtcctcccattattcgaaaaattttctcaggaccatagacaaggccctttctcctcgggtggaagatcgttataactccgcggaagagtggatgaaggatctgggagtggaaggaggggcgctctcaaccattaagttctccagtgaggagttcaagtccgcccgtaagcgttttttcaatctgtttgccttgtcctcttcccgcatcatgtcggaagggcacgaaaagtggggggccggatggaggaaggtgctggggctcttcgttgttgtgggcgtgattggcgcaaccctcggctattttgtttatgactggggaggcggcccggaggaggacgatgctttagggcttcgctttcccagtgtaatgtccacccccattccccagattatttcagaatccaggggcgtttccttgctgagtcccgtggaacgttttgacgtcaggctggatagtccgtctttgtcgcgccatgctcttccatccctgcttcccgaccgcttttccttggcgtgtgtccatttgagggtgcttcaggaagacaagatgtgcccgctcctgtatttgaccatacgtgatgaggagggaaagctggtttcccggtctctcaacggcttttccttcaccttgatcgagagtcctgtgctcaccgggttccgctttgtggatcttccggcgctgaatgtggatgcgccttacaggttcagttttgaaaccaaggataatgttcctcatccgttgaaggttgtttcttcccaggttacgacgctggaaagcgggaaaaccgtgaggccccattttaaattcatttgcgcgatggatgaccccgcggtgagagattcgctgaacaggccggaaaacggcaggatccgggaaatgctcatcgcctcccggaaaaggaaccgtacggaaattgattccatcgtgctgacggaacaggagaaggcgcaggtgcggaagttcgccaaggcggggtatcccgccgcccagtataaaatagcccgtctcatctttgaacgggatgggagatacggagaggaaggaggcgcctggctttataaggcggccatggggggctttattgtggcgcagagggatctggcgtttcttcttgtggggggcaaggaatttttcccggatatgcttcagtgcccggtcagcctgtcccagaactattctcaggcggttgatttccttctgatgtcctttgccgcgcaggatccttccgtgctgtatatgctgggtgtcttgtattcccaggggtggggggtggaatattccgcggagatggtcgcgcgcctgtccaggctgttggccggttccggttacgacctgtcgcggcttaccttgtcgtcccccattttatcccattgggagcttctggggcagaaggaggaaacctatacgaggatgcgctgctccattcccggcaggaagatgagccaattttcaggactgcggctggtacggacctccgtggaagggggaagtatccttattgacaaggtgattctgttgcggaacgggcaggaggtcatgtcccgttctttccgtacggcccttacccgggagtctcccgtcctggaggtctccataaacatggaggattacgcaaaggaaatggacagttccgaatggtcgatagaggtcatcatggctccggccaatacgtccggcatcatggaaatgatgaggaagaaggagttttccggcgcggaagagctgcgaatttgatggaaggattttaccacgggaaaggagagaacgcggcatgcggtttccgtccgttatcggaagccgttcggggcggaaggccccggcgccggggctttcctgtttccgctggatggcccggccgggaaggctgtggcgcggtttagatgttcttcagcatttccagcgcttcccgtagcttgtctgcgggagagacgcctgccagccgcggaaatttgttggacagcaggataaaatccccgttcctggtgagcatcaggcgctgtccgctgatttccaccatggagatgtttgctttggaggccagtatcttgattttgtgggaatccagcaggtgatgcaccgtttccggtgcagggccgaagcggtcttcccacgcgcggagcagggcgtccgcctccttcagggtgcggactgccgccaggtccttgtacgccgaaatgcgcagggctgcgtcgctgatgtaatcccggggcaggaaggcgcccagataatccttgcgggatttggcggcgaactgcgtctcgctgttcacgatgaaatccgttctcagggctgcgtccggccggggggccgtgtacctgccctgcatgtgggcgatggactgctggagaagctggcagtacaggtcaaagccgatggcggcaatatggccgctctgctgggtgcccagcaggttgcccgcgccgcgtatttccaggtccctcatggctatcttgaagccggaacccagctccgtgtactgcttgatggcggagacgcgcttgcgggcgtctcccgtggtggcggcggacctggggagcatgaggtaggcgtaggcccggtgccccgcgcggcccacgcggccgcggagctggtagaggtccgccaggccgaagcggtccgcgcggtcaatgatgatggtgttggcgttcgggatgtcgatgccggattcgatgatggtggttgccagcaggatgtctgccttcccctgcacgaaggtgcgcatgaccttctccagctcgtccttgggcatctgtccgtggccgatgacgatgcgggccttgggcaccagggcctggatgcggtcccggaacagttcgatggttttgacgcggttgtgcagcaggaaaatctggccgccgcgttccagttcgcgctccatggccttcttcatgatgcgttcgtcataggggcatacgctcgtctgcacgggctgccggttgacgggcggcgtttcaatggagctcatgtccctcgctcccatcagcgcaatgtacagggtgcggggaatgggcgtggcggacagcgtgagcacgtcgatgcccttgaagcgttccttgaatttctccttgtgcctgacgccgaagcgctgttcctcgtcaatcaccacgaggcccaggtttttaatggacacgtcctcggagatgaggcgatgcgtgccgatgacgatgtccacggccccggacttaagcccttccagcgtggagcggacgtccgccgcgctgctgaagcggctgagcatttcaatccgcacggggtattcgctcatgcgctccttgaaggtgcggaagtgctgttccgcaagcacggtggtgggcaccagcacggccacctggcggcctcccgtcacgcatttgaaggcggcgcggatggccacctccgtcttgccgaagcccacgtccccgcagatcaggcggtccatggggcgggtggcttccatgtccgccttcgtctgggcgatggcgcggagctggtcctgggtctcccggaaggggaaggagctttcaaactcccacatccatttgctgtccggagggtggctgtagccctttccggtctggcgttccgcctgcacgttgaggagctgggcggcgtagtccgccacggagcgttccgcggactttttggcgcgctgccatttggaatcccccagcttgttgagttccggcgtcttgctgcccagccctatgtaccgtgaaaccaggtgcgcctggctgagggggacgtgcaggatcgtattgtcccggtaaaggatgttcatttcctcgtctccggagtccggagaggtggaaatgttgatgaatttgccgatgccgtagctggtatgcaccaccaggtctccggggttgatgtccttcagggaggcctgcgcgcgggccttgcgcgccttgtcctcccggctggcgcggcggcgcgccgtggcggactggtacctgccgaacagctccgaggaggagagaacggccgtttttgcccccggaatgctgaagccgccgggcaggtccccgcgcagggcggtgatggacagcagcgcgggcgttccggcgcagatgtcccggaagcgctcttcctccccttcgttgggaaaaaacatgctgacgttccatttccggtccagccattctcggatctggcgttccgccagctcccgccgcatctcctgcatcacgaagtccccggcgtcaaagctgcccaggggattgtcatggatggccagggagaagtcctcctccccctccgcgttcttcggcggtgcggtgaggatgcacacgttcccccgttccttgcagaagggggccgtaatgaccaggtcgcccggcttgatccaggcccgcagggtttccacgcctgccgcttccgtcaggacgaggttgacgtgctccgtcttccggaaggaaatctgggagtccacgtcaaattcccggatggattcaatctcgtcgtcaaaaaactccaggcgtacgggatgggaggactggagcgggaaaacgtccagaatgccgccgcggcgggaccactgcccgcgggaaatgacctgaggaacgccctcgaaccccgcctcctcaaacagccgtatcaaatcgtcaggggcgtgcgtttctcccgttttcagggtcattccctggttctgcatgccgtcgggggagggaacctcgtcattcaggctgccttccgtcagaacgacggtttgcctgcccacatggccggaagcgatgcggtgaaggacgttcagccgttccgcggcaagctccgggtctcccacttcctcccccagggccacctctttttccgggacgaagaggatgttgcgcactccccatgtttccagttgcgcggcaagggattcctgcgcgcgcagatggggcgcgatcacccaggcccgggcggtgtccggaatggtcctgatgcacagggccgccacgaacggaaccccgggcagggaggtatggtcgaaaaccgcctgttcctccgtgcccagtttcgcgagttcccggtgaaagggtgcggtgcgggccaccctgtccatcagggcggttatggaagcgtcttctgccatgcgtgtctgatagcccctgctggtggaaagtgtgccgcctttccctgccatgtcaacggtttttcagggcacagactgtcctccggccattgacggaagcgtctttccgcatgcgcggcgcgggtcaggaggaggagcggaagcggattttaacgccggccttgcgccatttctgttcaatctccttggccagctcctcatagctccggccatcaaggaggagcttttgcgcttctttttcactgctgccggactggatggccttcatgtagttcttcacgcgctgggcgtcccccttgccgtccatgtggtagaaatagtaggccatcagagcggccaggccgtaattcaggttggcgttctctcccgtgaactgggaatagggcatgttcatgtaggactccaggctgggcgcctcaaagtcgtcccccagggcgcggccccccgtatttttcttgccgtattccgtcacgcgggagacaatgtgggaacggttggccccgaagttgaagcggcctccggaatacggggtcatccccatgtattccgcggagccttcacagaaccagcttgcctgcttggcctccggggacatgagctggtgcgtcagttcatggatgagggtggaggaatccttgtcgcggtcaatgatgtacgtgctccccatggtcttgacgcccagggaatcaaacgggaccaggattttgccgcggtctccgctgcgcgtcgtccccaggaaaatgcctgccgtgccttcacggcctccgttttccaggtacgtgctgaacttttcgtacaggtaggcggggaatttggcggaatcgtcgtgaggggggatgttgccgatgggaagcgttttgttcgccaggtgggtggcctcgaagagaaggcccaggcgcttgatcatgccggcgcccagcttggcgtcgcagatgaagcggaaatggggcgtttcataaatatactccccttgttcctccttgatggtttccaccttgaaattgtcctggcatttgacggtcctgggccatggcaggtggtaattgtccgcgggattggaggaggcagcccctccctttccccgggccgcgatgaaatccctgtcttcccgggaaagctgggcgagggggatggagacggtttggccgccagagcgtttcagcacggctttctggccgtccagcctgacgaactcggcttccaggcttttcccctggacgctggtccaggtgcgcccctgcgcgaggggaaggaaggagagggagcacagggctcccgtcaccaggtacaggcatgcgggattcttcataaggctggggttggggatatgaaagaaagttgctgttaatgtttgggacgcggcagcatcaggagcagcagtccgcagagcagcatcaggcatcctgccgccgccagggtggtggtcagcggaacgccctggtccttgaaccatcccccgaagaaggagataagggcgcccacgcccgcggacgtgaggttgaggaggccatagccggtggcggaataacgctcgtcgatatgggagcgtagcacaggcatgagggtggcgtccagcgatccctgcgccagcccctgcgtggcgacgaggcccagcatgagcacgaggggaaccgcaatgtcccagccgaagatgccgggcagcagcgccaggaccaccagcgggccggatatggtgaaggtgatgccgggcaccagggcgcgggcgcgggcgttgcgccggtaccacatgtccgccagaatggcgccgcccagcacggccacgtacttggctacggagctccacagggtggcggcggggcctgcctccgcggaggaaagctggtatttatcctgaagcagggtggggtaccaggtgagcaggaaccagttcccggcgcctgcaaaggcgaccacggccagcagcatccacatggggcggccgctcagcaggctggaaagcacggcgccggtggaaagattggacgcgggttccttgatggcccgttcgtcattgtccacattgatcaggaccgttttttccttgggttcggacggctttttggcctgcgccgtatccgcaggggccttggccgggtctttcaggaacaggatgaggacgatggcatacgccacgccgatcaggccgaacagggcgaacgtcatgcgccagcccgtccatgaagccatggtggccccgaagccggccacggccatgcccacgtaaatgccgctcatgtgcagccccgtggcgatggagcgcgtgctgccccggtggtagtccgtaatcagggccagggcggcggggatgtaaaaggcctcactgatgcccatggcgccgcgcgcgatgagcagggacgtgtaatcctccgcatggccggtccaccaggtgaccacggaccagacgacgagggagcagagaatcatcaggcggcggctgtagcggtccgccaggaagccgcccaccgggctgagcagggcgtaaatcagcaggaagacggaggtgaccatgccgaactgggcttccgtctgcggaatgtcccggacgatgggttcatgcagcgcggaaaggagctggcggtcaaaatagttcagcatgaccacgaaccacaggacgatgacggccacccaggcccacaggcccggcctggtgttcgggtccgtgacggcggaaacatttttaacgccgttgcgcacggcggaaacgatgatgatcgccatgacgatgacggtcaggatgagaacggcgtaatcaaccgtgctcatttcaaaatggtaccctgcggaggcggaggcgttcacgggggtccggacgcccggggcggtttccccgctgatggtcatgatctcggaacccttcacgacggcgggcgcggtggcgatgccgacgggccactccccctggtgcgtccatttgtttccgatgacgtcataaaccaggatgtcgcgggactgcaccacgggcttggacgggtccggcgcgttgccgcgcttgtccccgccgatgaggatgatggatttttcacgtaccggggcggggcctgcggcggcggctacgggcgttcccggtccagcaggctgctgtttgcccgcggctccccattcggcgggatcgttggacgtcatgtcgtagccgatcatgtcggaaaggtacgttctggcggtttctccggcggcatccctggacagggtgcagccgcctgcgatgaacagggtgctgtcacagacggcggcggtggagaggatgcggcccgcaccggggaagggcgggagggacgcccatttcattttggccgtatccggagtggtgtccagcatgtagatggtattgagggcggcttccggctggtcgctgtcccgtccgccgatgacgaacagcttgtttccgtgagcggcgaaggcggcttccgtaacggggacgggaaggggaggaagcttttccacggagccgtccgccttgatcagcagggcgtctttcaggatgccttccgcattatggcctccggctaccgccagccccttgcctacgcttgcaaaagccgcgtaacccagcggaacgggcagcgtccccaccttgctccattggccgttgcggagtttgaaaatatcctggtggtacgccttaggcccgcgttcttccggcgttgaggctcccggagcggcctgggggaaattggcgccgcctgcggcgatgatggactgggtgccgtcactttccgtaacggttccagccgccattccagcgcggcccgccgggtccggcaggtcgggaatggctccggccgggtgtacatccacggaaaaagaggcgttggcagcgggggccgccatcagcagcagggcggcgaaagcggagccgcatgccctggaaaaccgggtaaggtgacgtgaaatgtgcatatgctggaagatagggatgggatgtgggtgaaaaatcaggaaagggtgatgctccacacttcaggggagcgcctgccgggtttaagttctccgttcacggctgcaaaacggccctgccacgcgcagcacggaaggaccgccctgggcgccgcgatgggccctgcgtcgtgccattccatggcggctgtatccaggcacagggactggttgttgaagccggggttggtctgcggggtatacttctttccggagccgtcgtccccgcccagcaaataaatcacgccgttccgggaaaccggggccggggtgggggccgcggcgatggcgtaaggcatctccggcaggcgcgtccatccgcgttccggcgtgaagctccaggcttccgtcagcaattcccgggcctgtttgccgtcctcctcccggaggccgatgccgccgagcacgtaaaggacgccgtccgccgcggccatctggtgcaggaagcgtccgcggcccggcagcgggtccagctcctgccagccctgttccggcccgcgtgcgtccagcatgaaaacccggttggtgcagtcctgctccccggggcgctcacagcctcccgtaagataaaccttgccgtccagaacggcggcggccgtgtaagccagggctatgggaaggggagggaagggagtcacagtgacggctccgtccgcagtgctcagcaggtaaacgtccttccggtggccttccttgccgcagccgccgatgcacagcaggccttccctggtgctggcggaggctccgtacgcgtaaggcgcagggagcgttcctgcctccgtccacccattctcccccggagacagcgtgaaaatgcggtccgtccacgttttggcgccgccttcaagcatgggtttgtccgggaaattggtgccgccggcacaaatcattgtttctccgcatgttccggcatacatgccggcgaaaccttccggatcgggaagagagggtaaaggggaccaggatgaagaatagagactcataacacgtgtaaatgactcgcgtgatgctagcgaaaaccgggccgcggcgccagtattaacctctggttctattttttttgaataaatttctttccccacgcctcttaccaacgtagaagaggagaatcatatgaagcctggaacctgttttttgatgttgtgcgccctgctgcctgcggccctggcggaaaatatgaccctgcggtccggcagggtgctggaagacgccagcgtggtgtcttccggagacgactttgtcagcgtccagtacacggacggggtggccaaggtctcctacaaggagctcacggatgcccagcagaaggattacaggatgacgccggaggacgtgaaagccaggctggaccagcggcgcctggaggacgcggcgcgcaggaaaaaggcggaagaggccagaaaggcggctgatgaagaagccaggaaaatcagggaatccctgtctgaagcggagcggcatccccgttatctggaaggagcggatatctcccgcatgtttctgctgctgggggaactctcccaggtggaggcggaagtcatggccctgcaatggaatgccctggaagcggaccgcgtgggactgccggaggatgcccgtaccttccgtgcgaggatgggaacctatcaggaacaggtgaacgccatccgtaaaaaaagggagaccgccgaacagtactggcaggatttggaaaagaaatacctggctctgaaggacggaacccagaagaaaattgcggacttgaacaagcaggtctcccagttgcagggggaagtaagggaggtggccagccagccgagaacggagcgcatcattgtccctccgattatcaggacgtggaactatccgccgccgcccgtcattatccggccttccccccttgccgccaaggccccatcccgtccctccccgccccgttccaccgcgtccgatgcctttgcctgtgaagcctggcttgtacggtggttgaaagtgcgtccgcgggttcctcctcttcttccggaaagcgtgcgccagcctccgcagcaaacgggctgccggaacaggaaactcaaggcacgggttgcccaggcggcagacgccgcggccccgggaagcattcccttcccgcagaggaaaggggaaggtcagattccggggaggggatacagctccatgcggccctcctggaaggaggccagatgcgtgaagcccgcctggcgggccaggtccgcggcgcgctcaaaatcccggcccacgtcctccggcttgtgggcgtctgagctgatggtgaggggaatattcatctccgccgccatctttaaaaactgcgcgtccggatactgttcggcgcacttgttgcgccagccggcggtattaagctccaggcaggcgccggactccttcatggcttccagagacggttcgtaataaggacgcaaatctccggaagggcggaagccgaacttcttgatcaggtctgcatggcccatgatgtggaacaggcctgaagccgccatctcccggaagcgttcccaatactgcctccatgcgtcctctacatccgtccggttccagaaatccatcttgtagggattgtcaaactcctccttctcccccagataatggacggacccgatcaggtaatcccatgcgtgcaggctctgcaagtgctctatccatggcccaatgccgggaaaccagtcgcattccagcgcggcgcggaccgtcaggccgtgcggtgcggcgcattcccgggcctccgtgagccagtccagataggccggcatgtccgcctgcttcatgcgccagtcgtcaaaaggctccccgggcattggggcgtgatctgaaatgccgtattcccggaggccggcgcggacggctgcctgcacatattcctgcggagtgccggaggcgtgcaggcacaggggggtatgggtatggtaatcgcagtacatggaggaatgcccatgttagcacggcggcgcgggcggttcaacccggaggacgtatttgccgattatttgccgtctttgacattatgggttgattttatggacaggattttttagagtcgcgttaaataggacacgtgacatatgagtgattggcaaggcttttccccgctgaatgattttacaggaccgctcctggacaacctgaagcgtcatcccaagcgcatcgttttcccggaaggggaggatgttcgcgtgctgcgcgtgtccgaacgcttcgtggcggaacaggcaggcgtgcccatcctgctgggcaggaaggaagtcatcaggaggatggcggaaatgaacggaatttccctgaaattcgtccgcatcattgagccggaaaaaagctcggaccttcaaatgttctgcgaccgctatgaacgggcggaacaaatgttcggcaacggattgcccatgaacacccgtgaaatcgtctccgagccggtccactttgccgccatgatggtgctttacggccaggcggacgccattgtggccgggaacatgaaaagggtggcttccgtcttccgcgccgtgaacaaataccggcaggaacccgttcctaccaagcccctctttgccatctcgatcgttctcgttcccggatttgccaaaaaattcggaggccgcggcatctacttcctggcggataccggggtgacccctgatcccaccgtggaaaacatggcctactttgccgtggaaacggccaaaatggcccggcacatgctcggcaaaagcgttcgcgtcgccatgttgagcgcctccaccgccgggtccgtgccggaactggctgcggaccgcaccagggccgctaccgcgctggcccggagcatggtgcagaaggactgcctgaacaatgaaatctccgtggaaggggaaatccagattgacgccgccctgtccccggactcctacagcgtgcgcgttcaccgcaactccatgcttcagcccagtgacgtgtgggtcttcccgaccctggacgccgcggacatctccaaaaagctgctctgcatgatgccctccgtatacaactatggcctcattctgggagggctgctcttcccgattgcccagctcccgcggctgacggatgaagacaggatgttcggcaccgctctggtggtggggaatgaagccattaaattccacctgctgtacccgcagggggttgctcccctttattgattgggcacggcgcatccgtgaccatcaggcgcttctccttgcgtacggccagcttgccgccgggcagggaagtccgggaaggaccgtccgtatccagaatgctcatcacccggagcacggcgtcctccgtcaggtccggaatatgctgccggcgcaggtaatcatgcacggcgcattgcctcagctccgcgggaagctggttgaccttgggcaggaacaggcgcccctgggggtctgccagattcatggaatccagcgcctgggaaagcgccgtgcggatttggttctcaatgcggcaggcgcgtgaaaaggaaaggctggtgtctcgctggaacagcgtgtccagcctgggaatgacctcatggcgcagggcgttcctggtatactctgcagactggttgctggaatcctcccgccatggaatatggcgatgctccaggtaggcggtaatatccttccgggaaaaatccagcagggggcgtacgacagtcaatccgttggcccaggtggaaacgggtgacatgccgtgaatgccggaagccccgcggcacaggtggagaagggctgtctcctgctggtcgttccggtggtgggccagggccacgaaagcccccggatagccggcagcccatttcaggaacaaggcctgccgggcatcccgcgccgcttcttcaatggaaattccacgcgaacgggccatgccgcggacgtccgcccgttcctggacacagggaacccccaggcaggcggcgtaccggcatacgaactgtgcctcctcctccgcctccgggcgcagcccgtgattcacgtggcaggcaatgaggtggcatcccggcatttgggaaagcagggaaagcagcgccatggaatcccgtccgccgctgattccggcaaggacgggacggccggagcggagaagctccgcagactgcttgtcaaaatggtctggtgtcaacgtcatgctgccgccagtgaagcaggaaaaaggggcaaagagaagcctgcaaataaaaaaccccgctttccggaaaggaaacggggttggaaaactgttggggacaagccttacttgttgagcttgggcttgccgccgctgcggcggacagcgccgaaacgcttctggaacttgtcgatgcggccttccgtgtccacgaactggttcttgccggtgaagaacgggtgggagtcggaggtgatgccgcaggaaaccacgaaatgttcaaccccgtcaataacttccgtcttgggggagcgaacggtggaatgggtgatgaagcggcgtccggtggtgatgtcgacaaaaacgaccggattgtactggggatgaatatctttcttcatggtgatgtattgcgtttccgacgcaaggggagcaccagtataggagtgttttattgcatgtcaagcatccccgcataaaaatgcggaagtttgtgaatgacggttcgggagcttgcgggaggaacggttatggggatgatgtaacggaaaatggagcaggtgctgaagagacccccctggtgggcgtggttttccctgatgggactggagattccttctgcagccattgcatgggcttttgccgtcagccagtcccatctggtggtagtctccaccccctggctgtaccaattcctctttgtggccgtctggtgcgtcaacatgctggaccgggtgcttaaaatattccggggaggccctgcggtatactcggatgaatgcctgctgtttgccaaaaagcactgcttcgtcatctccctgctcattgtggtggcggccgtgacggggctgtggatcatgttcttccaactgggcgtggtcatcttccagtttgccctgcttccgggtatttgcagcctgctcttcctctacttttcctccaatccgcacaaaaaggggagcctgtcctccggattcgtcatggcatcattctttgccgccgtctccttttctacgggagcgggaatccctgcctacttctatggaacgatgggcggaggctggggcggccagctgtccacgcccacctggtatctcgtcgctctggtcatcctcagcatgttcagccgcaaacggtggaatgaagaagaggaggaagacgggcaggactccgccgcccgggacatggtttccctggtctggatgggggtgattgtgatctacgtcgtcttctgcctggccgccgccgcccgggaatataccggtgacgcgtggatctattacgggctggccatggcgggggtattcatgttcgtgctggacaggttgaagaagaacatgccccctctcctgctgtacaccctctcctgggtggcgctgatctttccgctgttgctgagcggtattctggctcaggcctcctcctgattgacagggaagaacttccttgggccggacacggcaaaacgcaggaaaattggaaaaatgatattttgtggttgcaataccggagatgcggtgctagattctgccccgcaaacacgttctgcgtgcaagcaagtggctcggtagctcagtcggtagagcaggggattgaaaatccccgtgtcggcggttcgatcccgtcccgagccaccatttttttctcccaattttttaatcccttttttatacgggaagtagctcagcctggtggagcgcctgctttgggagcaggatgtcgcaggttcgaatcctgtcttcccgaccattttttactcccagtaatgggaaaaaccagggagagtcttgaatattccaaaataaggagggaaataatttttgactttttaatttgatttcaacataatgacaaatgccagaagaactactgttgttgataagctctattttagttttttgttgtagaaattagtagaatttcatccgatgaatatgagattcacggcatttctgaagctattgggattaatggtctcaactttgcttgcattatgttccttctctcttggggtggaaaatttctccaaccttcctccttgtcccggaagcaggataacggatgctttagtggattcttcaggtattttatgggcttcaacccagggtgagggattattctacttggagctggataaaaatgtctggaaaaaggcaggaacagcggcagattttccagatactgaaaatttctatgccctggctgaagatgcccagggaagaatatgggtgggaacagaccgttggggagtgtgtatttggaatggcaaacaatggaaaacatacacccgtaagacgacattgccgggtggccgtgtttttgacattagcgtctcttctgcaacaggggatgttgccgtagcaacctcgggaggcattgctatttattcccctttgacggattcatggaaggatgtcacgcgggccgatggcttgcctgaagatcaagtttcagcactagcctttgataggtcgggagatttgtgggtaggcttcttaacggcaggaatggcccggatgactcttaaggatgaatacaagacctgtgagttttttcagtcaaaatggcattcggatgatgcacgcaagctttcgcaacctccggttcttttcggtgcagggctgccgtcaaatttgtgcaataccatggctgccaatggtaattccgtatttgtgggcacaacgtcaggactgggaataaaacgcggtgacaaagagatttttatccggggaatggatgccgtggaaaaactgaaagcgaagggaattatgaaatcttcccaaggtaaattgaggcctcttcccgaagattatgtgacgagcctttatcccgtaaaggaaggagtgtggataggcttccgcaatcaagttcccatcttgcttaatccggcaaatatgcaatatgaaagttctgtgaacactaaattggcagagaaaaaaaagggaggcacagtcagttgttttgttgatcttcctgatgggactgttttagctggagtttttggagaagggtttcgggtcgttggaaaaacaacagccagtaaaaagaaaagacgtcgtcttggagatgaaatcaaacatccaaaaattttttccattccagatgatcaggcatggcataattctttgaaccagtttcaatctctgccgcttggcgaaaggccttatggtatttgttttgcctgtgatgattgggaaacacagggcgactggtgcaacagatatggacgccatttttccttaagacgttcggcaaaaaagtcatggggaaatatcatgcatcgttttgatcaacgaaaggatttccgaggctatttgtatgacgccagagtaactctcgggccgaggaagaaaatcaaagatgcctggatatcggggaaattctatgaagaaaatgcagcgtcccgaatttgtctgtacaacatcaacgatgcgacccgtccctgttccgaatggagtgatcagggttatatgcacggtaccttttttgatggtccagacttatgggttcttgtacgcgttcctgctggtaaaaatgaaatttccctctacttcaaccaacccttatccaatgacatttcacgctatgatcgggattacctgatcgaagctcgttttgtcgaatctcgtttgcctcaggaggttctgattcaaaggaatgggaaaaaatcggaaaatattgtaaaccttgaactaacccgtatcatgtcgcttcctgttatggtccgtacgagatgccgggatttcgggaataatggagtatataaaaattttcggaattatcccttttagtcttgttctccccctcctattgcatagggtaacaaaaaaagctcctttcaaagaaggagcttttgttagatgttcaaatatgatttgaatctattttagacaataaaaaatttactcagaagatgaaatagggtcacattgatgctgttctgcttcatttttaacttgagctttaactgtttcattgctcataatattatccacatgcacatgacacaatgttgaaagacattcaacaaatagaaaaattacagctataaaataagcaataacataataagccaagactgtagctggggccaaaagaagatagagatttttttcacccaactcggaagaatatcctttatacatgaaataaattcctatgacacatgtaggaaaagataaataaggatatagtctgactgtaaaaaaatgaccaatcttatcaactttctcattagcctgctcataacgtttttcgaagtaatctacatgcaaattttttttatcattagatgacattaaaacacagagcttagcaagcccgtgtttcataatgtggaatattcgaaatattatatttttaaaaatttgttgaggcttgtcccatatgttagtagcgattaaaacaccacacattacagcacaaaaattagaatattcgtctggcataataggagtaatttaatttcctaaacagaacattttccaaacccagcatcgaaaatacatttcaagttttcgaccatttctgggtcattagcgcaaactttagcatgcctattttcagcatccgtttcataacgaaatcttttattgtcagagatgcaaaaatcgttgtttgagcatttacaaagaaggtgaacctctgctccacctttcaagttcaggatatcataacaatctcttgcctctggtacagaggaccgaaccgcaatacgaatttttactcctctattcatggcatcaacaattaaatcttttgtttctttagtgccataaatatcagaagcaagtttagaacattgaatgtaaacgtaatttactgaagcacgaataatttcttgaataataatacaagcatgctcgcgactgatattgtctatccactctggcgaatcttcttctatttttttaacaaagtcgtttttgtaaaaaattgacataataattgtaaaacttaaaaatatcgggaaaattatgtcgaactcttaagtctggtcaagcttttcctgtttttttataatgttcagaatgtttgctctctaaaaaattacactttttagcaatttcatttgatggcattttgtttctgttattcctgttggaattgactcttattgaatgctatccgttcatctgatgccataggtatttccttatgtctcaaatagctttctaacaaataataaaaatcgtttttagggtctcttattgtagggatttactccctcctaatctctcttccaccgccctcaaaatccattcctccacagacaacccttccttgacggcccgcttgaccacttcattcagagtagaatttttcattcgaacggcgatttgagattcgagttccgaaggatagtccttactcatcaaatgacgcaatgagccttgcacgtttttagggattctttgacgggcaaaccagttatgaaccacggtggtttggactccaagagccttggctatttcggcacggctaatggaatgttcgctgagccattggcctaattttttagtgtccacatagtccggttcaggcttggaattgctcgtaaacatgcggtttgattatctgatagaacccagttcatagaaagaaagagcttgtgttgttcgcatttgttatgttaataactcgcatatgatgattattgcgattcgcaattgagaccctcaagagggaatctttgttggcaagcgtgacttcattatgacttcaacccataaacgaccatgaagaaaaacttatttataacgtgtgcattaggtctattatcctgtgctttttcagtccaagcgtctgacccttggaactattatagagcaggcagttcttacagttccccatcctatactcagaaatacgattctacctttggaatgagtatcaagggtgtttatgggattgcgggagatagtgacatgcccaatcttggcggcggtctgctcagcctaaattcctatactgaaacaggagatatcgttcacgaattgtctttgacggcgggattgatgtcttccgatgctaaacatttcaatgcctttgatattggccgcgaattgggatattccgatgctcagattcaacaatttcttaatgataaaaatattacgaatgttgacctgaaaatcaaataccaaacatctattccattactggcgggatatacattgaaccttccattagtacaggagaaagcgtatttctacttaggaggcaagattggcatcacctttaatacatggagagcaacagcaacgcttgatagaaaagtttggcataattcctcttatcgaattgagcgtaagagaattagtgcttcagaatacaatgctgattttaccttttctcttacggctggcttccgttttgccattggtaacaaaacagatttgattctgggctatgaactcctcaagttccatgaagtcgaaccctaccaccttatccaagctggcattagctggaccttctaatccccttcggcggtgaattaactggcctccttcctttcggggaagggggcgattctttgatttgcatgacttaggccgtcaccttgtttgcagggtggcggcttttcatttccagcacaaccccatcaaaacctcaaaggcctcattttcgttcctataacattgcctgaaacagaattcatccacatatttctgtaggtgtttaagggagacatgatgaaatattccatgaatccctcttttcaataaagcccagaagctttcaatcccattggtatgaaccccattgcccgcgctgaacataacgttatggtcaatcatgatgcgggtaaggttcttattgttaggatattttagaatattgtagcccttgaactggtcagtcatgactttggtattaggtttgcaaaccttgctaaggacattgaataattgtttgcccgtcaattgttttccttcttcattcctattggcaacgacggcatgaactttcccagttcccctttctctgactccaataacaggaactttagccgtccctcttcctctaggatttttcggcaaatcgtcatcatccccatgttcatttttcttccggggttttcctccaacataggtttcgtcaatctcaacaatcgcctcaaaagtttctcctacctctctttttgccattgcccctctaatcttatgcatcatcctccaagcagttttataagaaacacctaattcccttttcaattgcatagcagaaatcccttttttagacaaacaaaccatattgatagcatacagccaatgccttaaaggcattcttgtttcttcaaagatggttcccttgaaaatagagaattccatcttacagttgttgcaataggcattgcggcaattatagtgagcgtgataaaccttctctgttttcccgcaaaacgggcaaactattttcccatcaaaccgtttttcaatcaggtattttgccacgctctcatcatcaggaaatttttcaatgaattcgcggtacgtcatgttctactcctttctttttctaggagtagtgtaatggattatgggggatttacaagattaaagtatatagttccgaaaatttttatacggaccgggccggattctattttttaagaatttccagaaatggctctaaagaggcgactcttggtggtgtttttctgaatgcatgtctggaaagcggctatcagaatgccaggatgccttcccctccggaacttacttccataaaaaatgctgatgttccggaaaatctactgaaagcttggagcaactgttttgtgaaacgggccgattctccatttcatcttcgcctttcccaaaaattactgctttatacgttcaggaaactatggaatgaggcttcagttcccgatccattgaaagaaaactggaagtggcatctaaagatctgggatgaaggcgatatcaagaaatttgaacaaaagatgcttgagacatggtcaacggagcaaatgaaggattcttattatcgctccagctataaattccccaacagtcccaatgtcattgattttactccccaggaaatcagaatgatggatagatggaaagttgattggaaacaatttatcattggaacaaagcaatacagtgaatcaaatgtaaataaaatgagattacggctgaatgaatattttaatcgataaaagacatatgagtatattgcggtattattatattgttctaattgcctgtcctctgattctgcaagcgagttgggcgagcggggagccgggaggtaaaatcaaggtggatcctcagtcacttcccatatgtactatagaagaggcagaaggagaggatccagaagatgagaacagcaataaatatgccatttttgaaccagagaaaatcaaggagtataaagctaaggggcaattcactgttgttgtcgtggagccgccgcagccacatgcaggatacgaattggacgaagagaaaaagtacgaatggaccgttacggaaaagttggaagtcaaaaatggagatcaggacacttgtactgtccattcgtctaacaaggaacactggggaaaagtgatcacggtaaaatgcaagatgagtttttatgagactaaaaacggacagaaaaaacatttgactgatcttgaagccgcacacaaattattaactccaagcctcctaatccatcaaataagtttcaatcacgtacagggtaagcatgacaaggatgctatggatttattaaaaacttataaagggaaaatcatagatgtcccggaagcaacttttgataagaatggcaaagcaacgaaatcggaaccttttctctatattggcggtaaaaaacctgatctaaaaattaaagcggaagtaaaacctggaatcataaagaaagcgaaggtaaagacaaagggtgagggaaaagtttcgaaaaatttcctcccagaactggatgaacaggaatttgataacaacacagaatttgaaattcctttcaaagataatattgattccaaattgaataaaggaaatcaacaatggacttggagattaacagagattcaaggaactgctcttactaacgagacaattgtttttgaaacaacagttaggaatgggtatgtcctgtttagtgaaccactcaaatcgccgtgggatatgaatgacaataagaaaaaaccatggattaaagcgctagatgtagtaatagaaggttcagggaatatagggcttgataaaaattcatcagattcaatcataaaaaatattactaattatacttttagcaagatggggtggacttatgatacggtgaggggagcaccaaagtatactccatcacttggtactattaatctggattcctatcttgagaagaacaatgggaatgtagtcaattgttacgaccaatgcttttctctaactgctctcgttagattgcttggaatcaacgtcgaaggaaattatcaggaaccttttgggaatatattaactgtcaatttaataggagtgggttcttgtaataatcctttttataaaaatcctcgccttcccgcagctcttgcggtcccagtcattctgaaaacaaatccctattatcagtataggaccggatttggtaatcatgcatatgtcgtattcgatgtaagtttatttggttcttcgtttaaatttatttatgatgcctgtgccggaccagtagttggtgatagttctaattcctatcaaaaaagcacgatagaaaatccacctgttccgcctaatagtagaatatttaaaacagagttctcatgaaaaatatattgattatactatttacaatatcatgtacttccgtttcattatttgcaacggagtctatgcctttgatgacagtagctgcggaaaaaaatagatcttccatgcaaagcataagattgcatgggctaaaagacttggaaaatacttcctttcattttggaagtaaaaagttaacagatcaggcgcctgatctcaaaaaaatcctccatggattaaaagtgagaaacggtattttttttgttacctccgattcatggaatcctattctctattgcaatcaacatggacatataaatggatcgatggatgtcagatactccaccagtgttttcggcatacggactgatatgattatttttgaaggagcttcattcaattattggtccatgccttccatttataaggaaatagtgttaagcgacgattgctgggttatgaccaaaggtgatgatattctttgttttacgtttaaaaacgctggattggcgttcaagggatttaccgatccggctacttttgttacccccgaaacggtaaagacgagatatgcctctacgcgtgaaatgctgcctgtacttaaagcattgtctctcgttctggatgggaaagcgccggctgtttatgattttgatttagcccaagaaaaattaatggaattcaaccgatctatcaaacagcgggaccgtagggccagagaagtatccaaactccgttggcaaaaagaagagaagcagcgggaagaacgaaaaaaacttgctcccgactatggcattcccggaaagtttccttttagcgttcgtggggaatctgatttatcggaaggtttaaagtggaaaaactttgatacatatttctcatctctttcgctttctcccgacaagaaggttattttgcccaatcccgatcagggtgctatcaatcaggcatggttgaagactgtttggaagaagggagacgtggatgtggtggatgaacaggaaaacggcgtggttgcgcgccttcatacggaagggaaagacgatgacaagagcgatatttggctttttgtcggctattgccagtctcagtctgcggccatgaacgagctgtattcacggcgttttcagaaaaccccggacaggcctgaacaatggtcttgggatgacgaaatagcaacagtggtcgtcaatccgttcaaactgggagattacagtttgggaaggcagggggtattgggcgattttggcggaattattccgtcgagcaacgagtcgtccctctttttcgtgaacggtaatacggtagtagcccttgtttccatggatccgtcttgttctgttctttccctaacagagcaaattgataagaggcttgaagcagtcaggaaaaacaaataaatgttgaaccgtatatggaacctgaataatgttatcttgagaagaaatcctggaggtgcagtattccggagtttttttagttcataaaaccagatatggggggtcttcgcctcttgtgcccggtctatttttcaacgtgcttttttattgcttttgggaggcattcccgtgttgagggagattctctttgttgatatcatggagaaagccgattttttacttgagcttcggagggaggcaagcagagtgaatatatgaagcagagtcagcaaaaaacagcctccttttcctggctggtggggttgaggtggtcatttgccgggtatgtggtagggacgctttttgcggcgggggcaggggcgctggattttcccatgctggcgcgggccatgcttttggcggcggcggtttgttttgtcgtgtctcttgtttgtgcgggggcgtgtatccggagcagcaaagcggcccgctggtacttacttcttgtactcgtgatgattatgatcgcgctgctgttcgggcgtgaaaatattaattagtcatttgtatatgttttgattgaccgagtgtgcactgatatataatttccgatcatgttccttcgattattatcaagtttctctctcatggctggcatgactctggtcgcccaggcgaacgcccagccttatccggattccgattcctcagacggttatgataccggctattatgcggaagcttattccggaggctacaatagctctccggctcccacgggggagaacgcctccaagcccgtttttcccacgcagtcctattttgagttgcttggccccatggattccagaaacggacatgggagcgtgaacatacagaattggatgacggacctgaatttgtgccggatgtccagcggttcctggggtttttcctccacggccgcccttcgtttgagctggttcaacggagaaggcgcgcgcgagatggatgtggatgagctgtacacgatttggctgaatgtgaccgcgtcttacaagctcagggggaagacgagcctggttttcggcgtaacgccgcagatttccacggatttcgatacctggacgacccataatttgtttttcggcggccatgcccttctcgcaggtcccttgaatgaccggttcagctatggtatcggcgtcggctgttatccgcagctgggagattttcccctccttccccttatccagtttgagtggaaggcaacgaacaattggacccttcaactggaaggagcccggctttcctatatcaacaaggtgagcgaggggctgacgtgggggcctttcgtttccgtggtgtccggcacctggacgattcaccatgaccgccgcgtccgccagttcgagtggatttccggcgtcgccggcgtgggcgccgacgtaggcctgggacactggggcagcgttcgtcccaggctggtggcggacgtcggtttttcctttgggaactccggcaccatcaagaccagcaacgggagccatgagctggagaagtaccattacgatcccggtttctacctgcgcgcgggattgcagtttgagttttgatcggccaacaggattagcgaatacataacaaaggcccccggagcattcagcgctccgggggcctttctgcaaatggggcgtttggagccggaattattcccggcagcggtcaggcttcttcaatggagggcctgcccacggaatggtactcaaatccaacggcccggatgttggccggagagaggatgttccttccgtcaaagatgatgcggttgcgcatgacgtccgccagcttttgcaggtccgcattcgcgtattcgctccattccgtggcgatgatcagcacttccgcatcccgggcgcattcgtacatgtcttcctccagcgtgacgcccatgggttctaggattggggcggcggtgtgcatggccttggggtccgtggcggtgacgatggctccttccctgcggagcttttcacacagcttgagggcgatggattcccggatgtcgtccgtgttctgcttgaaggccaggccccagacggctatttttttatccttgagcacccacagacggtccctgatctggtccaggaagtggatgtgctgggtgtcattgatatgttccacttcctccagcagggtgaagggaatgcccagcgtgcggctgatgttgatgaaggctttgacgtccttcgggaagcaggagcccccgtagcccagtcccgcgttgaggaagtggcgggagattcgcttgtccatgccgatgccttccgccaccagttccacgtccgctcccgttttttcgcagaccttggcgacggcattgatgtaggaaattttcagggccaggaaggagttggcggcgtgcttgatgagctccgcagagttgacgtccgtttccagaatgggcgcgtggatgggctggtagacgcgcttgatgacgtccatggcgcgttccgagttggcgccgatgacgatgcggtcgggatgcagcaggtcgtccaccgcgcatccctccctcaggaattcagggttggaaacgatgtcgaattgcacgtccgttcctgcatagcgcttgatggtctggcggactttttcaccggttttgacgggtacggtggatttgtccacaatgaccttgtaacccatttccggttggagcacctgggcgatttcccgggccactttttcaatgtaagtgaggtccacggagccgtccgtattgggcggcgtgggtacggcaatgaagatgacttcactttccgcaatggaatcagcaatggaggggaaaaattccaggcgtcccacggccacgttttttttcacgagttcttccagcttgggctcgtaaatgggaatggacccggattggagggtgcgtattttttccgcgttattgtccacacagatgacgtggtggcccatttccgcaaaacaggtgcccgtggtaagccccacgtagccactgccgatgatcgttaaattcatggtatcagtgcaaatatatggtaaaaacttggttgatttaaaggataaggcctgcagggctgatgttcaagcataatggggaagaggattttttctgtcaaaataaaaagttcctgattgagcgccgttcttccctgtgctataaccgggaccagacagaaaagatctgtttattttaatttgaacgttatgaaaacacctattaccgttaccgttacaggagccgccggccaaattgcctattccctgctgttccgtattgcttccggcagcatgctgggaccggaccagccgatcaacctgcgcctgctggaaattcccccggccatgaatgctctggaaggggtggtaatggaactgcgtgatgccgcgttcccgctggtcaatgaaatcgttcccacctctgatccggatgaagccttcgccggcgccaactggtgccttctggtaggctccgtgccccgcaaggccggtatggaacgcaaggacctgctggacatcaacggcaaggtgttcatcggccagggccaggccatcgcccgcagcgccgccaaggacgtgcgcgtgctggttgtaggcaacccctgcaatacgaatgccctgatcgccatgcacaatgcgagcggcgttcccgccgaccgtttcttcgccatgacccgcctggatgaaaaccgcgccaagagccagcttgctgaaaaggccggcgtccatgtgacggaagtgaccaacatgaccatctggggcaaccattcctccacccagtacccggactttacgaacgccaagatcggcggcaagcccgtgacggaagtcatcaaggatacggaatggctcaagggtgatttcatcaccaccgtgcagcagcgcggcgccgccatcatcaaggcccgcggcgcttcttccgccgcctccgccgcctccgccgccgtggatactgtccgcagcctggctacccagacgccggaaggcgactggtattccgtggccgtgtgctccgatggctcctacggcattgaaaagggcctcatctgctccttcccgatccgcaccaccaaggacggcggctgggaaatcgtgcagggcctgccgatcaacgcgttctcccaggaaaagattgacgccaccgtcaatgaacttaaggaagaacgtgacgccgtttcctctctgttgaagcattaaagttgatttgctcttgcgccgggcttcccgttttcggggagcccggtttttttgtgccttgaaagctccgtaagcctcattttctgcgggacagaagttttcccccgtgttaaaaagaaagatggatgcagcatccgcttatttatggaccaagaccgcatattataccggggtgaggcctttacactgaccggaaattccgtgcgccaggatgccgcgcattgggcggaggtgcagccggatggccaggtgaagaccatgaagaacggccgttattccgaatggcgcgttctgccggaggccggaaacgccccgcattaccggggaagctttgaagtgctcaataaggcctacagcctggcgcttaacgaggccggcgccctgctcaatgaagaagggacgttccggacgggagccaactggcccaccgtgtggacccgggatatttcctacgccacccatctggggctggggttgtggaatgtccatgcctgcatgaagagcctgaatgcccgggtgcggaacggggaggtggagcaggataccggcacgggcggttcctggcccatttcctccgaccgcgtggtgtggggaatggccgcctgggaggtttactgcctgacgggggacgccggctggctggcccgttcctgccgcgtgctggaaaagacgtgcatgcgggatgaacaggtgcttgcggctaccggcggcctggtgaaaggggagtcatctttcctggattggcgggaacagagttacccggcgtggatgacttccgcggacatcggggattcatgcagcctttccaccatggttctgcatgcggaggcccgcaaggttctggcacggatgttccgggaactggggctggaggagaaggcgcgggaatgggaggaaaaaagcgtctccctgtccgccgtcatcgagcggtttttccggattccggagcatgccctgtacgggcagtacctgtatggccggggttaccccgtgctgtcggaaaaggtggattccctgggcaatctgctttgcgtgcttctggggcaggctcacggtccgcatgccgccggaatggtagccgttctcccccattgcgtgtacggcattccctgtttccatccccagatgccggacggcgtgccgccttaccacaaccgtgccatgtggccgttcctggagggctattacgcgcaggccgccgccgcggtggagaatgagtctgccctggctctggcgttcgcctgcatggtgcgcgccgccctgctgtgtgggacgaacaaagagaacgtgcttctggaaacgggcctggatgaagggctgctgctcagttcggacagccagctctggagcattgccgggatgctgggcagtttttacaaggggttgttcggcatccgccttcagccggattccatggagttccgcccctgtgttccggagtcttttgaaggagttcatgaactggccgggctggaataccgcggcatgacggtggatgtgcgcttgcgcggccacgggcgccggatagcgcggtgcctggtcaacgggcaggaggctccccccgtgctttctccgggcatgaagggccgcgtgttcgtggaactggagatggttgccgcagaagaaggggcggggcaggtgaatctggcccacatgggcggcagcctggaggctccggagtggaaggcagcccgccatggaatcgcctgggaggccgtggccggagcggattattaccgtgtttaccggaacggcattcccgtgtcccagacggagtattgccattacatgcctgcccccagccggggggacgtgtctttccaggtgatggcggtcgctctggacggcagggagtcttatctgaatgaacccaatgattatccttccgcggatgcccgcatggagacgcgcccctgcgggctgagcggggatgaagtctggttttcccgcgttacggagtctccggacgccctgtgctataatgtcaacatagacaagcccggcgtgtaccgggtggacgcctttttcgcgaacggcacttttgacgtttcagacgggaacacctgcgccctgcgcagcctgtacctggacgggcggcgcgcgggcacgctggcttttccccatacgtcacgctccggcaactgggagcatttcatttattccacggcggtggaggtggtgatgacgcccggtccctgccgcgtggaagtggtgtacgactctttttccgagaatatgaaccgtctggtgaatgatatggtgataaaacacctccggtttacccgtatatcctgacatcggttcatggattttatgtcgaaacgcttttttgtcttattgctggccctgggcgccggggcgtggaacgcccccgccatggggaaggatgcggaatcagcctcccggtctccggctcccgcggcccgggaaggggcggagttcacccgcctgcccgtgagctggacggtgaatcccggggatgccgccaacgcgcgcgccgcatggaaggccctgagcgcctatcaccaggggaagcccaagtcttccagaaagctgcacgtggtttacgtaacgttcaaggacaggccggcccttgaaggataccgggaacggtatgaccatatcctgaagaacatccaggcctattatgcggaccagatgcaggccaacgggtttcctccgcttacgttccaattggacctggacgaacgggggaagctggtcatttacgatgcctatgtggacaggcccatgagcgagatgaacgtgcagagctccggtcccgtctcccgggaggcggccaagaaggtgctggcgtccaaggggattgacattgaaaaggaacacgtgctgatcgtgtgccagctgccggacggcgtagggccttattacggcggcggcttcagccaccagggaacgggctggacctgcgaccaggaggggctggatcccgccagcttcctggatacggagatgatgcagggtggccgcttcaaggtgaccaaggggaagaacgccaccatttacataggcggcacggctcatgaactggggcattccttcggccttccgcacacgggcaacggatgggactaccccaacgcgggggattccctgatgggccacggcaattccacgtacggcaatgaactgcgcaacgaggggaagggggctttcctggcgcctacggacgccctgaaactggccagcgttcccctgttcaacggcgtggagacagagcttcctgctgacgcctcctacgggcgcatgatcggcaaatacgttccggggtcctttgaacggctggaggccattcccgtcaaggacggcctgcggctgaaaggccgggtgcgcctgacgcggcccgcttatggaatcgtagtccacctggaccctcccggcggttcggattatgattccaatgccgtgggagcttccctgaatggaaagggagagtttgacctcaccatctgccggcccggctacaggggcggctttatagaaatgcgggtggccgtgctgaactgcgacagcacccgcagcatgattacgctgcccgtgtggatggacgcccagggggccaagactccttcgctggcccagaccgtttacttcggcgacgttcagaacctgtggatacgcggccgcgcggaggaagcccggaaggccctcgcggaggtggagcgcaagcatggctcccgtccggaggtgaaggaatggctccccatctggaagcgcgccctggagcgccaggacccctccctggaggctacccctgcacagattcctgcggaaaccgccagcgtcagcctgaatgactgcaagccctccgtggctcaagtggggtgggccgttccgttgtgggacgtcctctttccgtctgacctggggcccgtgcctttcttcaggacgatcgggaagccggaacgcttcatcctggcgcatgccccggccgtcttttcctatgacctggacggacgctggaaggagttccgcgcggatgtggggctgcccttcggttcccgcggcagcgtcaaattcggcgtgtacctggacgggaaaaagcttgtggaaacccccgtgctcaaggacggctcctccgttccggtgaaggcggcggtggagggcggcaggaagctggaaatccgcgtggatgacgccggagacggcaatgccgccgattggggcatcattgccaacggcattctgacccggtaaatttccgctccactggcggagaaatgtgacattaggcttgtcttttgtcctttctcatagtgttctgtggactagccatgattgggatgaatgcaaagctatggggtgccgcggcgctgattgccggcgctcccctgtttgcagagacgcccgcggaacagccgccgtcctccccgtcctccggttccgggcaggaagaaccccagggggaaatggcggggaacctgctttccggcacgctcatgccgcagattccctccaatatctccatcaccaatgacgggcccatcagggtggagaaagccaggaagatcatttttgaaggcccgcgcgtgcacatggtcacggataccggggtggaggtgtttgcggattacgcgcaggcggatatggaccggagcagggtttttctgaaagggaacctgtccatttaccagagcgacagcaagacgcgcaccaacagcctgatacgcgccagcagcgcggagttcgactgggagaacgaagtgctcctcacggacgccatccgggcgaagatggaagggctgatcctgcgcagcgggaagtttgaatcccggaaggacgccgccggcaagacctatctggaagcccgtaacgcctccgttacggcggaggacgtcagcgaacccctcacctggatttcagcggacaggatacgcgtgtatccggaagacaggttctccttcaaaaacctgaccctgtattacgggggcgttcccttcttttactttccctatctcagccattccctgaatccggaggtgggctatcttccccttcccggcatgcggtccatctgggggccttacctcctgaatgaatacgggttcctgctgggggaaaaatggtcggacaacggcatgccttccgccgactatctgggcaccctccatgtggattaccgcaccaggcgcggcttcgcctacgggctggacatccgtgacgtgctgctggaaaaggactgtccggacatgacgggcctgtccttttacaaaacccatgacaagggggtgaagattaacgccggggatgatgaataccgcgagcacctggacccggaccggtggcggctggcgctccagcagatgtggtcccaccgggtaaacgcccgcacggactggcggctgaaggccaacgtcaacatgctgagcgacgagtacatgctccgcgacttttatccggaaatctatcagcgcaattcttctccggataatacggtgcttctctcccgcacggacgacacgaatgatttttcactgctgcagcgtttcgttcccaacaacttctacatggcggaccagcggacggagttcagctatgaacgcatcaagtcccccattttccgttctcccgtcatgtatgaaagccgcaccagcttcgccttcctgaagcagtacgtcccccctttcatgcggacggaaatccgggatatgctggacgagatggagcccggaaccacttcctatgattactgggcccgcatgctgatgacggacagctacagccggttccattccttccatgaaatttccgcctccaagaaaatcatggggttcctgaacctgacgcccaaactgggcgggggctacaccgggtattacggcgtggaggactacaagccgctcaaccaggggattttttatgccggaacggatgcggacttcaaattttcccgccgttattcctccgtgtacagtgattccctgggcctgaacggcatgaaccacatcgtgcagccccattttacgctggcgtacgtgaagaccaaccgcctgagcgagctttatccccagattgacggagacacccccaccaccaatccgccgtccctgagcctgggcaggtatacggagattgactccctcccaacggggctggtattccggtacggcctgcgcaacatgctgatgaccagccgggacgccaattcccaccgctggttttcctgggatgtgttcatggatgcgtacctgtatgacccgatcaaccagcgggacttctccaacctcttctccttcatgcgctggaaccccgttccgtggatggaataccggtcggaaatgcaggcccccatcctggggaaggacaagatttccggctgccatgagtacaacaactcactgcgcttcatgccgtggcgctccacggaattcgtggtgaggcaccgttacctgaaccagcactccctgctggaggacagcagccagcttgacctgcgcgttttgcagcgtttttcggaagcctgggcattcagcggcaagtggcgcttctccctgctggacggaaagctggacattcaggaatacaacgtgtaccacaacatgggttcctggtatttgggcgtgggagcgttcgtgcgcaagaacgggaataaaaacgaattcggcctgggcatcagcttcaccattcagcagaccggggactacatgccggtcaagttcctctaatgtccggggaaggtcgcggttctcttgtaatgggtgcgccggaagcgtttctccttgttacggcatccgtgtttttagggatggaagctgcccgggctgtgtgacgtttttccggggaggggggctttttctccggggttgcgtgattttacaggggccgggaaaccgggattccctggttggagcggaatgcgagacaggccgtcctcaaggtgagtgaagctggaagatgaacgaatcagcttttgttcatggacccccccggacacggtccaaggccgcatttttacaattcgtccgtccacgttcatcttcttttcagggagggctggggcttccggcgtaccgggtaggaaaagtttttccgcaagaacccgctgccgcgcttgtgccggaaccttggcttgcattccggggaggaaacggggaagatgccatgacatggggcaaaccgcggcgcatgccatggcggcaacgccgcccggcgcgccggctacgcggaaagctcccgcatcaatcattttatacgaatatgaacgctcaggaattgatcaagacgctggaatggcgctatgccaccaagatattcaacccggaccgccaaattccggcagaggattgggaagcccttctggaatccctgcatttgagtccttcctccctcggtctccagatgtggaaattcctcgacgtgcaggatccgtccgtgcgctcacggctccgggaggtttcctggggacagccccaggttacggacgcctcccatctggtagtcttctgcgcccgcagggacttcaagccggaggatgtgcagcgctatctggaacgcattgtggaagtgcgcggcgtcaccatggaatccctggagcagtaccgcgcgcgcatttttgaactggtggattccaagtctccggaagtcctgaaggcatggctggaacgccaggtgtacatcgccctcgggttcatgatgagctgcgccgctgacctccgggtggatacctgcgctctggaaggaatggaccctgcggcctatgaccgcattctgaacctggaaggctccccgtactatgcgctttgcgccctggccctgggctaccgggatgaagaggcggacaaatacgcccgtctggcgaaagtgcgctttgaccgggatgacgtcattccggtcgtctgacgggattttctttaatcccccgcttcaagcagttgccgcatgtcttccggcagcggggcttccgcggtgaaaacttcttcatcaaacgggaactccagccggcaggcatgcagcgcatggcgcggcaggatcagccgttcttccagctcccggctccagccgtgctggatgtattccagatagcaggcttcagaggggccgtaaatcttgtctcccagaatagggtggccgaggtgcgccagatgcacgcgtatctggtgcatgcgtccggtttccggaatgcaccggaccagggccagcgggccgcggggcgtgttccacgtccgttccgtccggaaaacggtggcgcatgccttcccggcggggtgaacggcctgcttgacccagatggggctttccgcgacgtccccctgtctcaggatgggggcggcgcaggttgtttccgcccactccggccggccttgcacgattgccaggtattccttgtgcatccggcgcctctgcatggccctccccagctcgcgcgccgccgccttgttcttggcgatcagcgtcaggccgctggtttcccggtccagcctgttgaccagggaaagggcggctccgttggctatttcatagctcagcagggcttccacgccctccagcaggttgggctccttcttcccgttggacgggtggacgatgaggggagcgcccttgtccaccacaatccagtccccggactcccccgccacctcaaagtgcggaaagcaggcaataggagcgtcggaaatgggaatccacatggcgaacaggaggattacagcgcatccggacggatgggcatccattcccccggctccaggttcaggctgtccagatgcagggagccgatggaaatgcggcacagggaggccacgggagcgcccacggcggccagcatgcggcgcacctggtggtacttcccctccgtcagcgtcagccgggcgcggcgcggttccaggatttccagcacggcgggggcgcaggggcggtcctccccgttcagcatgaaagttccggaggcgaacagttccacggcctccgccggaatgtcctcttccgtgacggcttcgtaaaccttggcgacgtgatgcctgggggacgtcatgcggtggatgaatttcccgtcgtccgtaatgagaagcaggccggacgtttccttgtccagccgtcctacggaagaaaccgcggggttcctgtgccgccactggaagggcagcaggtcgtaaatcacgtccccctccccgtcgtcatggctgcacgtatatcccgcgggcttgtaaagggcggcgtacaggccgtccgggaactccaccggctctccgtccagcaggatgccttccgcctgcaccttgtccgtgggggcggagcagggttcccccttgaacgtgatggagtggcgtttgatccagcccggcgcttcccgcctggaacagtacccgtagcgggataaaagagcatccagtctcatacggcgtattttttcctaacgggaacaaaaaacaaggttgaagtatgcctccccggctgatagcattaaactattacatgcggagcctccccgtttggagcgctgccgttgttcaccatttacgcttatatagttccatgattgaaacgattacagaagaacagttgaccccccagcaggccgaattttgggtgcgcgcccgccaggcggtggacatgaacaattatccctatgccgtcagcctgctcaaggccctggtgaagcagcttcccggctttctggaaggccgcagggcgctccgtgcctgtgaaatcaagctgaacccggaagccaagaaaggcggtctgttcagcggcatgaaaatcagcaccagcaagctcacctcctccaagaaggatgcggccacccagctttccgcgctggaagacgaactggaaaatgatccttacagcattccggtcaacgaggccctgtacacggccgccatggacgtgggcttcccggacctggccgcctttgcgctggaaaccgtccgccagggccatcccggcaacaagaagatgctccacatgctggcctcccattacgtttcacgggacatgcccgcccaggctgctgaggtgtaccatgacctcgtgaagctggaccccacggacagcgtggccgtgaagagtgaaaaagactgcatggcccgcgccacgatgcagcagcagaagtgggaggaagccaagagcttccgggacgtgatgaagaactccgcggaaacgaactccctggacaagagcgacaagaagggcctcacccgtgcggagctggaagaacgccttgggctcctttccgcccgttatgcccagaaccagcaggacctggccgccgtgcgcgacatcgccggcgtctatgaacagatggaggactgggcgaatgcctattccttctacaactacgcgttcagcctcagcaacaatgatatttccctggaaaacaaggcctctgaaatgaatgagcgctaccgcaaggcccaggtggaggaaatccgccgccgcgccgccgcggagccggacaacaaggaacttcaggaacagctcgtccagttcagcaaggaagcggcggaacagcaggtggccgtgtgccgccagcgcgtggaaaacaaccccacggacccgcagacgcgctttgaactggggcaggccctcttcgactgcggcaactacacggaagccattccggagctccagcgcgcccgcaacaacccccatatccgcatccgcgccatgctgttgctcggcaagtgctatgacgccaagaacatgcatgatatggccctgcgccagttggaggaagccaacaaggaactgattgaaatgaatgacaccaagaaggaaatcctttacatgatcggcctgctttatgaaaagctgggcaagaaggaggaatccctggcggcgttccagcagatttacgacgccgaatacggctaccgcgacgtagccaagcgcgtggaatcctcctacagcaattaaggttccgatccattccgcgcccgcgacggggcgccattctcaaagcctttgccggagacggcaaaggctttgttgctggatggacggccttcctgcggatgggctgcgccgggccggaagcggccgcggcggcctcctttccggtatggccgctgtgaggctcttttcccgggatgcttccgtcaaacgtattacttcatctgccagattccgcaaaggcagcggtagcggggaggagaggagtacacgcgctcctgtaattttccttgcccgcctctgcaagaactggaaaaatggccggatggagaagctgatgcaggcattgcttattattgacgttcaaaatgattattttcctggcggccggtttgaactggcgggcgccgttgaagcgcttgaacggaccagggccgtactggaccggttccgggaaaaggggcttcccgttatctttgtccagcacatcaacacccgtccggacgcttcgtttttcctcccggataccgtcggcgcggaaatccatccggacattgctcccgcgggggatgagccgattgtcgtgaaacatgctccaaacagctttttccggacgaatcttctggagctcttgcaagccagggaagtgaatgaactggttgtctgcggaatgatgacccatatgtgcattgataccaccgtgcgcgcggcgaaggattacggcattcccgtcacgctcctgtatgacgcctgcgctgccagggatttgaagatcatggagcattccatcccggcccagacagtacaggatgcgtatatggcaggcttgaatggaatgtttgcggaaatcaagctggcggagcaactggaactttagggtccctagccgcagaatgtgcctccggaaagcagggcaaaatgcctgtagggaggggcgccccctgttccccctctgtgcggcccggcccgtttttttgggcaaaacacgcggtttgcgggaaatcctgtaaaatatatccacagttaatcaacatgaacctggataacggaaatggaacaatgccgggcgttgcccgcatcgggctaatcgagcatgcctcgcagggacgccgggggagggatttccggtggcggcggcacgcataccggaaaaacgcttgcggcgcagcgggcgcttgaaaaatattcctatccctatttatccattgaccatttaaagatggggttgatacgcagcggaatatgtccccttgcacctgaaagcccagatgaagagctcacccccttcctttggagcgttatcagggaaattgtaaaaaccgccatggaaaatgggcagaatctggtggtggaagggtgctgcatcccctttgactggaagaaggattttacaccggcctgccgggagcagatccggtatgtttgcctgattttttcagaggattatattcaaaggcattaccatgacatcatggaccatgcaaacgcgattgagcagcgcatggatgaggcgtcctgcacacgggagagcctgctgcgtgaaaacagggacaaccttgagaaatgcaggcagcatgggtgtgactatctgttgattgaggagtcctacaacgtggatatcgtgttgtaaaaacggaggtctcgtgtgaggcctttccggagagaggcggcgccatgcctgcctgcggctttccatagcgtcaggcattgctcgggatggacatttcacccgggcggagaagttttccggcagcggcttcccggttttacaacatggccggaaggcggctttgcgggaacggaatgctgcgctgccaccgttcccatgcggcggcagagggagtgaattcctgacgttttcattttacccttgatccttgaaagggaaatgctagcgtgaattactgtaacaactgccctgatgaaaatctttttcgcaattcccgttttttgcctgtttgcgggcgtttccgcaccgggtgacgaggcgccggaggaaaaggcggtttccgtcattcttctgtcggctacaagtaaaatcccttgggagcccggaataaaaaaaccggaaagaacgttccaggtcgtgctgggtttttccaatcccggtcccggcaaaatcatagggagcagaaaggagggcatccgcctggagatacgtgattccaccggtggagggaacgttccttccgattatgttgatttcctgcatgcccgcgatcccgaattcaggatggaaacggaagattgggttcccgctccggacgcccgctgggtgagtgtaaaggggaatatgctgctggtgacagcggagaaggaggtgacgtccgagggctgtcttttttccatggacaaggaaaaggaagaacgccatgttgttctgaaaggcgggagcctgatggatgacggccggcagggagacgcgcaggctactctgaaaataacaaggtcgctcaataaggattccggaaaaataaacctgaacgtggagctggtttcgtcacgcatgctgggtatttgcggagtgacgctcatgaaaccggacagtactcccgtgatgggaaaaaattggagctggggctattcttccggttccggcggttccctctcctgggaatgggattacaggctggaaccggaagaaaagggggagatacaggtcttggtgaattacatgactgagctgaaacggattgacgtgcctgtcgacctgaaattcggtttgtccggaatggtccgggaaacttcacggcagcggaaaccatgaaggcgatacattgtttatggtgcggcatcgtcttcttcctgccgggctggcacccgtgccggggagcggaagaggggaaaatggaggaaaaagtgggaatcgtctttagggaagcggggttgaagcgggacacggggaatgacggcggggaaggggtactgcaatggaagtgcagcgccgttctttttatccgcgaaccctgggggtttggagagagtagcgtggtggaaaaccagtctttgggaaggtgggcagcggatggcagggagctggcccctgtggaatttcaaacggcatggctgaatgaaaatagtagaaaaggagtgagtttcacggtaattgaaggcactgcggccaatctgccccctgccggctgtgcctggatccggctgaagggatgcctgagggtcccggtggcgcgcacgctggaaagccctgtttacgaattgcctttaaggcagggcgccgccgccttcattccgcttcctggcattgaggaagagaacggcgggaatgtgaacgatgtggtggaaccgtgcgagctgccggtggggaacctgtatgtgaaaaaatgcgagcgggtgacggaggatggaaaaaaacagctcatgctcagcatttgtctggacgcgaataacgcgttccgtccggaaaaattccagcttcttgacgagaatgggaaagtgctggagtaccagtcccttgacaattcggagattgatgatgagtcaacaacctggacggccgattttacgttttcccctccggaaaaaatgaatgcagacaaatgcagggtccggctggtttataaaactgccctgaagtatgtttccgttcctgtagatgccaggttcggcataggcggggaaatacgggaggaggcggaaaagcggggaggaaagaaagcaggctagcgttttgccggaaccggcgcttcttccttggcggcggtctcttttcatcttgtgccgttctgcgaacgtgttatgctgaaaaagtacccttaccccccctgcctatgcttcactattgcctgccctggctggccgcgttctgctgcgcggctgtttccggccccgctgccggaaaggaaagccctgaagaacctgccgtaaccgtttccctggatggttggagaacgaacctccaggaggccgggccgttttcaaaagccagccggtcgttttccatggatttgaaggtcagggaaacgtcttcttcatggaaggtggcttatggcggggagtccggttccgagctggccctgacggattccgaaggaagttctcctgccaaaacgaattgccgttacagtgattcccgttcctaccagcagagcaacatagccggaacaatttttttaagtacgccgtcctggctgccttcggaaaaagccaggtgggtggaagtcaaaggggaggttcccttggtgatatatagcagccccgccgtttcggagagcgtgacgctcaagatgacggtcaaggatttctccgttcctctggtgctcaagaacgccggactggacggcggggacgtgaaggtcaaactgaaaggccattatgatgagggcggagacgacacgaaggggtatatgctgagggtggaagtccattcttccactccgcttggctttctggattttgaactgcattccccggatggcgctccgctggtgacggaaaattacggttccagctccggacgctccctgaagagttatgactggggccggtacttccggatgcaggggaagaagcaggaggaactgaaggtggccgttcaatatgcggagggattaaggaaaatcatggtgcccgtccgtatccggtgcggcctgtccggcgccgtggaacaacaggataccccgaacaaggagaactaggatgaacaggcagagcattattgttgcccggtttttgctgtgcgccgctgcggctttgggagcggcggcgtggggcggcggcaagccggaggaaaaaaatccggtgaaggtcgtttttgtttccgtcggcatggaaaaaaacagcatgtggattaacggagcgccccaggaatcccctctgcagctgaagttcggagtaaatttcagcgtcaagtcccccttgggctttggatcgcgatacaatgacggtatccagtatctggaggcgaccgattccaccggcaggaagctggccccggcagagtttaggatgggcagcatgtacccgcggagtgaaggcggaatagtacaggcaaccgtcaatggagttgccggagaactgccttctccggacgcttcctgggtacggctgaaaggggtgttccgcgttcccgtctcccgttccgtggagagccctgtttacgaatttcccctggcagaagaggcggaagagcatgtgccgctgccgggagccaatgaccgggaggaagcgggcggcggagacatcgtcctgtctgaaagcgtgcctacaggcaggcttttcctgaaagagtgcagtacgtttgaaaggaacggaaaaaagatgaggaaaatgattctggggctgggggtggaaagctccttcgacctggaccgttttgaaattctcaatgagaaggacgaagttctggaaaccgaatcccggggcggggggagcagaatgaactcctcctaccgtgaatggacaaggcgcctgcagtttgaagagccggagaatatgcaaaaactcaggttccggatgatttacaaggttcctgtggagccggtctccgtccccgtggacgtcaagctgggcatgaggggggagatcagggaaaagaagaagtaaggcggtcttcgctgcttcctgcttcggcggcaggagggcgcggggcaggtctcctgcggagaattttccgggactggccgcgtcagagcaccttggagaagaattccttcagcctggggttggcggggtggtcgatcacctgggcgggaggcccttcttccacaatttttcccttgtccatgaacaggacgcgggaggccacctcccgcgcaaaccctatttcatgggtgaccaccaccatggtcagcccaccctgcgccaggtccttcatcagggagagcacttcccccaccatttccggatccagggcggatgtgggttcgtcaaacaggatcacgtccggattcatgaccagcgcgcgcacgatggcgatgcgctgcttctgtcccccggaaagctggaggggataggagttcctcttgtcgtacagcccgatgcgccggagcagggtttccgcctgggccacggcctccttcctggtggagcgtcccgttttgaccggggcgatcgtgatgttttccaggatggtcaggtgcgggaaaaggttgaagtgctggaagaccatgcccacgtgccggcggaactggttgacgtccgtgcggggggaggtgaccagctcccccttgaagaggatttccccggaggtgggttcctccagcaggttcaggcagcgcaggaaggtgcttttcccggagccggacggccctacgatgaagaccacttccccccggtcaatctgcgtggtgacgtcattgaccgcaggcacggagttgaattccttcaccaggcggctgatctggaacatgggggtgtttccgggctgttcattcattgtttttcagtctcctttccagtttgccgagcagccagctgaacagcatgaccacggagaggtaaatcagggctacggccgtcaggggcatgaaggcggtgtaagtctggctccggatgatgtcgccgcccttggtcaggtcctgaagggcaatgtagccggagacgctggtctccttcagcagcacgatgaattcgttccccagcgcgggcagcacgtttttaaaggcctggggcaggatgatgaaaatcatggtctgggcgtatcccaggcccaggctgcggccggcttcaaactgccccttgtcaatggccatgatgccgccgcggatgatttccgccacgtaggcgccggagttgaagccgaaggccaccacggccaccagcaccttgctgacgtccacggtaccgaagatcacaaagtagataatgagcagttgcacgaccacgggcgtgccgcggatcaccgtcaggtacagtttgcagagggcgttcaggaagcggaaattgcccgtcttgtcatgcgtggcgcggatgacggctaccacaaagcccatcaggatgcccagcaggacggagaaaaaggagacctccaccgtgaccaggaagccgttggccaggtatttccagcggccttcctgcatgaagttgacgtcaaaggagtccttcaggtccagccacatgttttccagccagttccccccggcggcgtgttttccggctcccgcggcggacttgacctgcatggccgcgtacgcggtccttatttcctccagcctgccggaggctttcaggtccgcaatggcgctgttgatgtcctggagaagttccggatttcccttgcggacggcaatggcataggattctgaagtgaggggttccggcaggatttccagccggtcattgcctgccacgtacattctggccgggtcctggtcaattacggccgcatccaccttgcccgccgccacggcggctacggccagcgccccgttggggaagcgttccggctgctggatgttccgggtgacgtagatgtctcccgtggctccgtgctgcacgccgattctcctgccgcggatgtcttcccggccccggatgggggagcctttggggacgatgatgacctgcgcggcttccacgtaggggatggaaaagtccacttttcccctgcgttccggagtgaccgtgatgccggaggcggccacgtccgcctttccggagaccaccgccgtaatcacggagtcaaagctcatgtcttcaatgaccagctccctgccggtgcgccgggccacctcccgcatgatttccgggtcaatgcccatgatggcgttcccctcccggaattcgtagggcgggaaggtcgcttccgtcaccatcaggattctgccgttttccgccgctcccgcgccgcagcataagaggagccagcccgtcagcaggactccgaggtttttcaggaaggaaatggagggcatggaaggtaggaaaaaaacggtggaggctgaaccgctgggatatatgatttacccgcccggaacgcaataaaaaactgtttcttcccggctccggctttttccggccctgcggcggctgtgccggggagcgtggggacgttcccacggtgcgggaatggattcagcggaccagccgcagaaggatccggcgcagcctgtaggcgatttttttcaggaaggtatggcggctgagttccgcgtaggccgccgcggcgtcattccggcgcatggcggaaaggaaggcgtcgtcacgggcgggatgggcttccagcgcgtggcgccagatggagctggcgttcaatttttcaagcgcctgcggcatgccgtccgccttcagttttccggagacggccagggttgccagaaagctgcgcacgttgttcaggaaggcccccagttcgctttttttccagtcttcccggtccgtcaaggtcagcttgagggaatgaaggcggagcatgtcgtcaaagagggagagggacaggttcccggtcacccctccgaatttatagatatacacctcctttgccagcacggcgattcgttccgccctggggaatacctgaaggttgaacagctggtcttccgcgtacctgagcccgctgggggcgggacggctggacagaaggaattcccttctgtaaagcttgatgcacattttcccgtaggtgtagaacaggccgtgcctgtccatgccgaagaagccggaatggtaggaggacaggaattcctccctttccaccacccggctgtgcgggatatggccgtccttcctgcggaagaggccgaagcggtccagatggcggacgtagtctccgatgacgacgtccgcccgttcccggacggccatttgagccatggcttccacgctgtccggaaaaatggcgtcgtccccgtccacgaacatcacatactctcccgcggccatgtccatgccggcgtagcgcgcggcgtccacccccgcgttctcccgggtgatgacccggatgttctgatgccgcgccgcataggcgttcagaatgtgcgccgtgcggtccgtggaaccgtcattgaccaggatgatttccagcggtgaccaggtctggcgcagcaggctgtccaggcaggaggaaacgcacgtttccaggttgtacacgggaacgatgatgctgacgaggggagcctccggaatggtttgaacagggtggtgcatgggcgcggtcgtaaaggctccgccgccatgaacaggatgcctgccggaacggaagcaggggacatggcccggaccggaggaaacgatagggcatccgggcgcgtcaaacaatgccgaaaagctgttttctacattatcgtatagttagagtcatttgctattttcttcatattcaatatataatgataaagggaaagaaaaatcgttttttgagggccaaatattaaaccggattaccagtccgttgtaaatcgaagacccggacaatataaactttaaggagtttctggatttttatggcaggggacggaaaaacggcttttccgttgggataaaaatccagaaactccttaaagtttatattgtcagaggcttctattgtcagcggactggtaatccgctaatgtccggccgcgcccgtttttgccttggcatgtgtttcgattttattcccatttcctcatacactgcattgtttaactggaccattctttttttaatccttggtgcggtttatcaggcgggaacgggaggaatcttttccgcttccaccgccaggctggacagcctggccggctttttattcgtcgtcgccctgatcatgtacatgggcgcgcgtcccgtcagcgcagagtttggagataccatcaattacgccgcggaattccagacgcttcagcagggagaggcgggcaactggaaagcccagttgacgggcatgaagggggaatggctgtttgccgtcattctgcatgcgtgggcgcagcacggcaatgtgcacgattatttcctgacctgttccgcggtatacgtgggagcgctggccctggccagctacaggattttcggagcccggtggttcattcccttcctgattacgtgcgccatgttcaccttctgggtatacggggtcaacggcgtccgcaacggcatggccgcctccgtgatgattctgggcctcaccttccgcagcaaccttaaaatgcttctcctttgcaccgtgctcgccgtcagcctgcacaagtccatgatgctgctggccgccgcgggagcctgcgcctggtttatcacggatacgcggtattacgtggcggcgtgggtagggagcatcctggccgtcattctggccggtcccgccatcggggagatgatcgcctcctccggctttttcgatgatccgcgcctgaccctttacatcaaccaggcggatgaattgaaggcttcctccgcattgttcagcagcgtgggtttccgctgggatttcctgatttacagcgcgctccccattgtgacgagctgttacttcctgttccgggaggaataccgggacgtgatgtatacgtggctgctgaacatctacattgcggccaatgcgttctggattctctgcatgtacgcggcgttcagcaacaggttcgcccagctttcctggttcctgatgggctttgtcttcatctatccctttttcaagcagaggttctgggcggaccaggaaaagaaactggcctgctttatcccggtggtttacgccttcaccttttacatgaatatttacaacgcatgaaaaggaagctcatccgggttgcggcgtcccctatctcgctggacctgctgctcaagggccagttgaattacctgaacgggttttttgacgttcttgccgtggcttcccccggagcggagcatgcgcgcatccgccgccgcgaaggcgtggaaaccgtggagctggagatggaacggaccatttccctgtggaaggatttgaaaagcctgtggcgcctgttcctgctgttccgcagggaacgcccgtggggagtgcattccgtgacccccaaggccggactgctgagcatggcggcggcggctcttgcccgcgttccggtccgcgtccataccttcaccggcctgatttttccctaccggaagggggccttcaagttcctgctcaagcagatggaccgcctgacctgcctgtttgccacccacgttattccggagggggagggcgtccggcagctcttgatggcggagaaggtgacgggcaagcctctggaaatcctggcccacgggaacgtcaacggcgttgatcctgattatttccgccgttccggctgccgggaggaagtgaggaagcgtctggaactgccggaagatgccgtgctgtttgtttttgtggggcgcattacggaagacaagggcatccgtgagctgcttgccgcgttttccgccctgcgcgcagagaccgggcgtcctcccgtttttctggctctggtgggatggacggaggattacgccggagacaagctggacgtgcccggcgtgttccgccccggttttcaggaggatatccggtcctggctggaagccgcggacgcgttcgtgctgcccagctaccgggagggatttcccaattcgctgctgcaggcgggtgccatggaactgccctccattgccacggatatatgcgggtgcaatgagatcgtgaaagacggcgtgaacggcctgctggttccggcacgggatgaagaggctctccggcaggccatggcggccatgcgggacgacccggaacggcgcgggaggatgggcgcggaagcggcggaacaggtgaaaagccgtttcagctgccggatggtgtgggaagcattgctccatttttacgggagggcgtcggcatgatttacggtaattgcgtcaagagggtgctggatttttccgccgccctgattgtgctggcggtgctgctggttccgttcctggcgctggcggcgcttctggccgccgccaaccgcggaacgccgtttttccgccagacgcggcccggccgccacggcaagttgttccgcatcgtcaaattcaagacgatgacggatgaaaaggatgaccggggagaactgctgccggacgaacggcggctgacgcgcgcggggcggctggtgcgctccctgtccctggatgaactgccccagctgttcaatgtgctggcggggcagatgagctttatcggtccgcgcccgctgctgccggaatacctgcccctgtacagtgcggagcaggcgcgccgccatgacgtgaggcccggcattacgggctgggcccaggtcaacgggcgcaactccatcggctgggaccgcaaatttgaactggacgtctggtatgtggaccatctgagcttgttgctggatgcgcgcatcattctgttaacgctggcgaaggtggtccagcgccagggcatcagcggtgaaggctgcgccaccatggaaaaattcacgggttccggaaaatgaagaaaaatatagcaatcatcggcgccgggggattcggcagggaaacggcctgctgcctccgcgcaatcaacggggagtccccctcctggaatttgataggtttctttgatgacggggtggccgccggaacggaaaacgagtacggccgcgtgctgggcacggtggaagacctgaatgcctggaaggagcctctttccgttgtgatcgcgattgcttcgccacgggctttggaacgcatttccggcctgttggataatcccctgctggattttcccaatatcatcgcccctgatgtgaagttttatgaccgcggccgggtggccatggggaaggggaatgtcatcagcttcggccacatcttcagctgccatgtggacatgggagatttcaacctgttcagctgcggttccctgatcggccatgacgtgacgctgggaaactggaacgtcgtggccaacggctgcaaggtgtccggaggcgtgacgctgggtaatgccaatttcctgggggccgcgtccgtggtgctcccgtgccgcacggtgaaggaaaacgtcgtcctgggcgccaattccaccctggtccgggatgcgctggtgggaggcacttatgcgggctgtcccgccgtgctgaaaaagaagccgtcccctgcgccggagaagaaatccaccgtctggctgtccctggcctgcacgggggaggcggaggaaaggttcgtgcatgaagcctttgaatcaaagtgggtgacgacggtggggccgaacgtggacgcttttgaacgggaactggaggaatacctgggggaaacgcatgtggtggccctggcgtccggcacttccgcccttcatttggggctggtgatgctgggagtggggccgggggatgaagtcctctgccagtccatgacctttgccgcttccgccaatcccatcatttaccagggggcttccccggtgtttgtggacagtgaggaaaagacgtggaacatgtctccggagatgctggaggaagccatccgggaccgcatcaggcagacgggccgcacccccaaagccatcattccggtggacctctacggcatgcccgccagcatgggggagatcatggagattgccgggaaatacggcattcccgtgctggaggacgccgcggaagcgctgggttccgaataccgggggcggaagtgcggggtgttcggcacgtacggggccttttcctttaacggaaacaagatcatcaccacctccggcggaggcgccctgtgctgcccggatgaggaatcccggaacagggtcaagttttacgccacccaggccagggaccaggcgccgcattatgaacacacgcgcataggctacaattaccgcctcagcaacgtgtgcgcgggcataggccgcgggcagatgctttccctcccctccttcctggaaaaaaggcgcggcatccatgaagaataccgccgccggctttccggcgtgccggggctgtccctgctggaaaatccggattcccgctaccattccaaccactggctgacctgcgttcaggtcaatccggaggaggcccggtttgaccgggaaacgctgcggctggcgctccagaaggccggggtggaaagccgccctctctggaagcccatgcatttgcagcccgtgttccgctcctgcccgttttatggctccggcgtatcggaccgcctgtttgaagagggcctgtgcctgccttcgggcgcttccctggccggggaggacatggaccgcatcattgacgtcttgttgaatctttaatgttcgctcttatgaccgagactcatagccagatttcaaaattcctctattacgcccggcattatctgctgaatgccagcgggaaattcatcttcctgctggatttggggctttcctccctggtcacgctgctggcctgctattacggggaatggatttacaagggtgactgggtggacaagcacatgggggtagccctcctcttcgatctcgctgtcacgggcaccatgctctggcggtccggcgtttacaagaccctggtccggttcacgaccatgaaggacttgcagaagctgatggcggccatcctgctggccagcatgctgctgtgcctctttaacattcttctctggcccgcgtattacaaggggcatgtcgtttgcgccattttcaatttcgtcatcaccttcctggtcctgatcgggtgccgcatggcgtgcatcggcggaagaagatggctggaacacctcaattccagcgaatccgtttcctctctcacgacgaccgggcgcaagaggattgcgctggtgggcaagctggacgcctgcctcctgaaagcctcccttatcagaagcctgaaaagtgaggaatatgaagtggtgggcatcctgacttccgctccggaggcggacggcaaggaaatcaaggagattccgatacggttgatcaaggaggccgcggaggtggagacggccttgaatgtgttccaggcgtcgggagtcgtttttgtggggaaggacgatttgctgggagataagaagctggcggacgtctgcctggaaaaggggattgaactgatgatttcccacgacctgttccagtcgtttcacgaatattccggcgtggccgtggatgaagtgcagattgaagacctgatggagcgggaggaaatcagcatcgacatggaaaaaatctctggcggcatcaagggcaaggtggtgatggtgacgggcgcggccggctccataggaagcgaactggtcaggcagctgtgccggttttccccgcgccggatcgttctgctggaccacgcggaaacgccgctgtggctggtgcgccaggaggtggaaaaatcatatccccacgttcccgttgccacttccatcaccaatgtctgccaccgccgccagctggaggaaagcatgaagctgtaccggccggatgtgattttccatgcggccgcctacaagcatgttccgctgatggaggagaacccgtgcacggccgtggtcaataacgtgaagggggccatgcatctggcctccctggccgtcaagtacggggtgcagcgtttcgtcatggtctccacggacaaggcggtgaaccccaccagcgtcatgggcgccaccaagcggctggctgaaatgtacgtgcagagcctgggggaagccctgctgaaaaagagcggaaaaggcgccaccgtattcattaccacgaggttcggcaatgtgctgggaagcgcgggctccgttattcccctgttcaaggagcagatcaggaagggagggcccgttacggtcacccatcctgaaatgatccgctatttcatgaccatcccggaagcctgccgcctgattctgcaagcgaacgccatggggcagggcggggagattttcgtcttcgacatgggggaacaggtcagaatcgtggagctggctaaaaaaatgattcgcctggcagggctctctccgctgaaggatatccgcatcgtcttcaccggactgcgccccggcgaaaaactttatgaagaacttctggcggactatgaacatacgctggaaacctcccaccagcgcatccgcattttccagacccggaaatatgacatgtccgagctgaaggaagcctttgaagagctggtgcggcatgcggaagcccaccatctggaggataccatccgcgccatgaagcaattgatacccgaatacaagagcaacaactctccctacgctaagtacgactacctggacttgaagaaaccccttaccatctaacctctgcttaatcatccaatgaaatacctacatctgttccgccatccctccctgtggagccgcctgctggtggccgccgccctggcgtgcgcgcttcccgcctgcgtcaagcctgaagaagtcaattacgtccagaacctggtgctggaccagaaagcgtccatcgggaaggaatataagatagtcatcaaaaaggatgaccgcctgttcatttccgtcagcagcaagaatcccacgctcgcgcagatgttcaacaaggacagcggcagcgtttccagccccagggatgacgagcgcgggtacttcgtgaacacggacggcgacatcgtgttccccgttctggggagaatcaaggccgtgggcaaaacctgcacccagctggcgaacgacattgaaagtgaaatcatcagggaagggtacatcaaggaccccgccgtcagcgtgcgcctgatgaacttcaaattctccgtgctcggggaagtgtccaagccgggcaattatgaaatcaagggggaacgcctgacgctgctggaagcgctgagcaaggccggagacctgaacatggacggcaaccgtgacatttacgttatccgggaatcacagggagagcgcattgcgtccaaggtggacctgcggaacagcgacctgttccattccccctactactacatccagcagaatgacgtcatttacgtcactccgtcggacaggaaggtgaacacgcgtagcgaacagctccagatttatccctacctgatttccggcacctccattgccatggtcattctggccttctgcatttaatcccatgaaagacctctcccccaagaaggaatccctggatgccggcggcgccgcgccggtatccctgcttcccagccccagggccatcatgggccggattgtccggaaatggtactggtgcgtgctttccctttgcatttgcctgcccctggcctatctgtacgcggcgcggcagccccaggtgtacggaaaggccaccaccatcctcatcaaggatgattaccccagggaatccgtggccgccacggtgctggcctccaccaacggaatagtcaacacgggcgccaccaatctggacaatgaaattttcctgctttcctcccattccctgctgaaaacggtagtccggaatttgaagctggacgtcacctactggaagaagaacgggttccggaaggtggaaatttatcaggactcccctattgcggcgcagttcacgcaggagggaaaaacggctgacgcccggttcctggtgattcccgtttccggaacggaattccgcctggaaaaggatgagaaggatcatcacgggcatgagacgggcgtcttcggcaaggaaatccggtttgactcccaggccttcatcgtggagaaaactcccaagtttgacgaaagcagcctgaacgttcccgtgattgtcaggagaacttccgtgaagaatgcggcgatggggctgggaagcggcctgaccgtcagaaaggcgagcggaaagaatgatttgatcaacatttccatgcgctgcaataatccggtgaaggcggaggatattctgtacagcatcgtccatttttacaatgaggcgtccctggaggaaaagaacaagcgcggcacaaagacgaacgagttcatcggagatcgcctggacgtcatcagtgaggagatgaagaaaaatgacctcgccattgaagatctgaaaaaggagacggacgttctgacggacctgtccacggccctcacggaggaatatgagaacagcctcaatgacaagaaggatttgagagagctggagcttgaaatcaagtccatagaatacctgaaagattacctggagcaggaggccgagcatgacgccaggctggtccccatcaattcaaagatagcggacatgggcatccgggaccagatcagcgtttttaatgacaccctgctgaaaaggacgagcctgaaggtgaatgccggggacaataatccgattatccgcgaattggaggccaatttgaactccctgaaggatgcgttgaagcgttccgtgaataactactatacgtccctgctggtcaagaagaagaacgtgcaggaccagcatgagcagacgcgggagcatatcaggaatgtttccagcagggaaagggccgtcaaccacattgaacgcgagcagcgcgtccgggaatccctgtacgttctcctgctgaacaagagggaggaaaattccctggccctggccgccacggaagacaacgcgcggatggtggacggcgtgcggggcggcaacggtccgctggagccgaacgttcccaagattctgatggtgggatttctggccgggatggctattcccgtgttcctgtgcgtggtcgcggccatgctggattccagcgtgaagcgccggaaggaaatagaaaccctgacctccattcccgtgtacggggaactgccgcgcaagccgcggaagctgaagaaccaggaaatcgtggtgaatctggaagaaccttccgagctgtccgaatgcttccccctgctggcggaacgcatggtggccctttccgacgggaacgaggggaaccccctcagcgtcctgattacgtccacctgttccggggaggggaaaacctatctttccgtgaacctggccctttccctggccgtggccggaaagaaggtgctgctgatggatatggatttaagaaaaggggcgctcagcgccctgctgggcggagccggaaagccgggcctgggggatctggagcaggccggggagggcggctggcgttccctggtggaacaatcccccgtttccgaccacctggattacctgtttgcgggaaccgtgccggaccatccctcccggcttttgctgcatgaccgcatcaggaagctgatggaggaagtaaaggagcagtatgatttcatcttcatggactgcgttccctactcctccctggcggatgcgcgcatcgtcgcccggctggccgacgttacgctgtacgtcatgcgggccggctgcgtgaagaagcgtgatttggccggattgcagaagatctggaaaaacggagagctgaagcgcatgggcatcgtcctgtgcgacgtggagccccatggccgctcttcccgcgggtatgccgtgtacagaagcctggacacctcctccccgtgcgcgggaaaataattcgtttcagaagcccgtcttatgccgcgttcccgtctgaaagtcctgttcctggtggaatccctgtccgggggaggggcggagaaagttctctccgggctggtgcgcggcctggaccgggagcgttttgacgtgacggtgtgcacggtggtggactgcggtccgtaccgggaggaagtaggaaaatacgcgcattaccgcaccatcgtgggcggccggggctggctctaccggctcaagtacgctctggtgtaccgttttctgcctgcgggctggatttacaagtggtgcattgccggggattacgatgtggaggcggcttttacggaagggtttcccacgcgccttcttgcagccgctccggaagggaaggcccggaggctggcgtgggtccatgtggacctggaggcccggccctggacgcaggggccggtgttccggtcgctggaggaggaaaggaaggcttacgcccgttttcaaaccgtggcgcatgtgtcgcaaaccgtcagggaagcgtttgaacggcgctttggagcgcatgccgggtccgtcgtcctgcacaatccggtggaccgggatgccgtgcgttccggagcctccgctgcggaggaagtgccagaaaaaaagtgtttccgctttgtttccgtggggcgtctggaagaacagaagggctttgaccggctgattgccgcgctggcccgcttgaaggagcgcggatggcaggcggaactggtgattctgggggaaggaagccggaggcgggagctggaaagccaggccgccgctctgggagtggcggactccgtgctgatgcccggcttccgggagaatccctacccgtggatggccactgccgatgtattcgtatgcagctcccgcagcgagggaatgagcaccgtggtcacggaggcgctggcgctgggcctgcctgttctggccgtggagtgttccggcgtgcgggaacagcttggcatgggaaggttcgggcgcattgtggaaaatcatgatggggcgctggccggcggcatggaggatttcctttccggcagggaatcctgtgaagattggagggaaagggcggcccggggcggggatgaggttgcttatgaaagcgccgtgcggaaggtggagcatttgctggaggaaatgaaatgaagaaggtggcgttttttgtcaacagcctgtccggcggcggtgcggaaaaaattctgcaaaccctgctgaaccgctggaacggaaaccggtggcaggtggtcgtttattccatcaggaaggaggacatcccgtccggctacccccggaatgtgtccgtccgtttcctgtttgacgccctccgggaggaggacggcccctgggcgcgcctgctcgtcaaaatccggaacggtctgaaattgctggtttacaggcatttcccttcttccgttttctaccgcttgttcattcgcggaacctatgacgtggaggccgccttcattgaaggctacgccacgcggatagccgccggctccccccatgccggaagccggaaactggcctgggtccacattgacctggccgccaaccactggacgctgccggcctaccggaacgcggaagaggaaaaggccgtttaccgccgttttgacacggtggcctgcgtctcccggaatgtccgggactccctgctggccctggctggtccgttgcaggatgcgcgggtggtttacaaccccgtggacgttccgcgcgtccgggaaaaggcggggaaatccgttccggaacgtccggaaggggccgtcctgttctgcgcttccggccgtctcgtgcgccagaagggatttgaccggctggtgacggcgtgccgctatctggctcaggagggcttctccttccatctctggattctgggggaggggcctgaaaggaagacgctggaacgcatgattgcggaggggaacttgcagggcaggatatccctgctggggcaactggaaaatccgtatccctacgtgaaggcggcggactggctggtctgttcctcccgcagcgaggggtattccaccgtgatttccgagagcctgattctcggcacgcccgtggcggccacgttgtgttccggagtccgggagcagcttggggacggggaattcgggttgattgcggaaaaccacctgttggggctttaccgcgccctggaagatattctgacgggaaaggcggaccgccgggactattgcgggcgggcgctccgcggggggagccggtttgacctggatgggcagatgaatgccgtgaaagaactttttgaagaaacgcgctgaaccgccatgccctccgtatccgtcattattcccgtgttcaacgccgcgcgtttccttgaaaaatgcgtggggtccgtgctggaccagaccttcacggattttgacgtctgcctggtggatgacggctccacggacgggagcggcccgctgtgcgacaggctggcttccggggacgagcgcgtccgggtcatccatctggacaggaacatgggggtttccgccgccaggaaccgcggcatgaaggaaacggacggccgctggctgtgtttcattgacggggatgactgggtgaccccctcctaccttcaggaactggtctccgccgtggaggacggcgcctgcgacctggtggtggaagggctgtgctccgtccgcgccgggaaaaaggatgaagtgacggtgccgcagcccatggagctggacgccaggcccggagaggaggaagcctgggtacggctgttccgttccttcctgctttttggcccggtggtgaaattgtaccgccgcaccctgctgtcccggcattccatacgctttccggaggacgtttcctatggagaggacctgatgttcaacatggcgtacctgaaatacatcaggcgtttgagaacggtggacaaggccggatacttctatcgccgggcggaggaaggcaccctgtccacgcgttttgtcccggaaaaattcatctggattgtcaggcagttccgcctggagcggaagtacttccataccagggggctggaaggggcgtcaatcgaggaatacctggccttccgctggtgggggctggtgtacaacgccctgtttgaaatctaccgtttcagggaccggtacggcctggcggagcgcatgaaggcggtgagaaccattgtgggaacgccggaaaacaacctgctgcgcgcttatcccggggtgttccactgtcccgggtggatgagcatgtgtttattcaaccgctggcccttctgcctgttcctgctgatggaaggcgcgcgcgccggaaaaaataaatcgaatgggcatgcataagattcttttatatccccatggaggcagcggcaatcacggctgcgaggcgatcgtcaggtccacgatgctgctgctccgtcccggacagggtgttctattctcctccgcgtgcggggaagacaggcgttatgggctggaacaagtggtgagggtgctgccggaacagcggcccatccggaggtgctcctccgggtatgcgggcgcgtggctgcggcggcgcgtgctgggcgtccgtgacgcctttgaccggctcgcgttcggcggcatcgtgaaggagggtgcggacctggccctgtgcagcggcggggacaattactgctacggggagcccgtgcatatttatttgcagaacgacctgctgcgccgcgccggcgtgcccgccgtcctgtgggggtgttccctggaacggaaggatatgaaggggcggatgctggaggacctccgggcctttgacctgattgtggcgagggaatccctgacctgcgacgccctgttggaatgcgggtgcctccgcacggtgctgtacccggacccggcgtttgcccttccggtgaaggaggggcctttgccggagggctggaaggaagggaacatggtcggcatcaacgtcagccccctgattatcggccatgagggaagggccggggccgtgatggaaaactatgtgcggctggtggaatacctgctggaagctacggatatgaatgtggccctcattccccatgtggtgtggcccggcaacgatgaccggaagccgctgggcgcgttgcgggagcgtttccggcacacggggcgcgtcgttatggttggggacgccccctgtgaggaattgaagggctgcatttcccggtgccgtttcctggtggccgcccgtacccacgcctccattgccgcctattccacgggcgttcccacgctggtggcgggatattccgtgaaggccagggggattgcccgcgatttgttcgggacggaagacggccacgtgctgcccgtgcaggcgatggatgaccctggcgagttgaggaaggcgtttatccggatgatggaaagggaggacggcctgaaggccgcctatgcggaaaaaatccccgcgtatcgggaacgcctggcgcgtttgccggaagaactttcaaccctgttgaagcggtcatgattgcgtacgtttccatcttgtccgtcctgctcctgctggttctggccgtggtttgcgtggatgcctggcgattcctggggactctggcggggcgtttccatatcgggcgctggcaggaccggcgcgcgtggcaggaggccctggcccggacggccgcggcatggacgcggcgcatgccggccgttcccaaaagggaccagggcaggcgcatcctgtgggagatggcgcggggaacctacgcggacgccgccattcaggggtggcaggcggctgggttgttcctgggtctgcacgtctatgccgcggacaggaaggatgaggcgttgaaggaaaggctgcgccacagtctggaggaacatgaactggttaggaattgcctggccgttccggagccggaacggtgggaggcggaccggctgctgctggattatgccgtgctggaggccggatgccgcggggcggaccaggtggcggaggcttccgccgcattgctggaatccctgcggacgggggcgggaacgctggcctacaggcgcaggcagcccggcgtgcgttacgtggatgcgatcgggctggcctgcccgctggcggccgcctgcgcggcacgtacgggaaaaggggaatactggaacctggcggtgaagcaggtggaggaatatgatatggccctgctgccgggttcttccttccccgcccatggctttgaaatggagcgcggctacccgctggggctgtatgactggtcccggggcctgggctggtacgcgctgggattgtgtgagctttaccgcctgatggctcggcacgggaggccggaggcggctggaatggcccggcgcattctggcgctggcggaggaactgctgcccctgcaaaagaaaaacggcggcttcggctggatggtcgccaggccggaatccgtgtttgaatcttccggaacggccctgctgggccttctgctgctggccgcctaccgtatttccggagaggagcgttttctgaaagccgccttccgtgcggaaaaggcgctgatgggggtgacgcgccgcaacggcgtgctggacatgtgccagggggataccaagggcatcggcatgtattccgacgtgtggagcctgatgccgttcgcccagggaatggccctgcggctgagcgtggaactcaacggggaggagggtaaggcgtgagaacgctgaactccggcaagaactttctggtgaccatcagcctgatggtcacgatgaccctgctgggctttgtgacgcgcaagctgttcgtcaatgagataggggtggagtacctgggcctcaacggcctgctgaccaacatcctggccgctgtcacgctgctggagtccggctttggaaccagcgtggtttttcacctctacaagcctctggcggagaacgaccggccgcggattctggccctgctgcaattttaccgcaaggtgtaccgcatcattgccgccgccgtgctcatcctgtgcctgtgcctgtatccgttccttggctgtttcatcaaggacgaggggcatctggactacctggcgctggtttatttcatctttgtcttcaactccatcctgccgtacctgacggcgtacaagaattccctcatcaacgcggaccagaaaaattacaggctgggcgccattaacttcatctatcaggtggggctgaacctgtccaagctggccatcctgtactggacgggcaactacgtcctgtacctggtggtggaatccctgttcctggcggggttcaacgtggcgatggtgcgcaaggtggatgccctgtacccctacgtcaggagcagggtctcccatgccctggacgccgtgacgaaaagccagatcgtcgtcaacgtcaaggccctgttcctgcacagcgtgggcggctacttcatgcattccaccagcaacatcgtcatttccagcttcgtggggctggcggcggtgggcttctattccaactacatgctggtggtgggaaccatttccaccttcatcatgcaggtgatcaacagcatggcggaaagcgtgggcaacctgatcgccagtgaggacagagggcatgtgtacgagattttcaagagggttttcctgattaactttctgatttcaggggtgtcctccatcgttctgctgaacacgctgaatcccttcatcgtctggtggctggggcctgaatacatgctctccggggcctgctcgttcgtcatcatcctgaacttcttcgtggtgggcatgaggcgttccgccatggtgttcaagaccaaggcgggcatctttcaccaggaccggtactccccgcttctccagggcgtgctcaacgtcgcgctttccgtcacgctggtgcagtggtgggggattacgggcgtgctgctggccgcgacgctcagccttctttccatcggcgtctggcaattcccccggctggtgtacaggcatgtattccaccagcccctgaggcggtacttcatcacgtacggatggtacctgctgctggcggcggcgggatatgcgctgacgtatcccctctgcgcccgttcctatttttcctcccccctggcggacctgttcatgtggggcattatttccgtagtcattccgctggggctggacgtactcgtgctgttcaggacgtcccccttccgcgggctgatgggccacatgcgcacgctggcatgcagatgaaacgtatattcatagccattcaatacatggagctggggggcgcggaacgcgctctgctggggctgctggatgcgctggacgcctcccgcttccgcgtggacctgttcgtttaccgccattccggagagctgatgccgctgattccggataaagtgaaccttctgccggaacttccctcctaccgtgcgctgtcccgtccggtaaaggacatcctgaaggaagggaggctgggcattgccgccgcgcgcctgtgggccaagcggcgttccgcccgttttggaaaacggctggaaggccgtgaaaactacgccgtctttgacgatgccgccgccgccgtctccccgtttcttccttccctgaaaaagctgggcgtgtatgacttggccatcagcttcctgacgccccaccgcatcgtccgggacaaggtgctggcccgcaggaaaatagcctggattcatacggactactcctccatcggaatcaatgtggagcgtgaattgccggtgtggcgcagctatgaccgcatcatctccatttccccgcaggcagggaggggcttcctgtcccgctttccggaactggaggataagctggtggagatgcagaacatcgtttccccggaagcggtgagggaacaggccgctctggaagacgtttccgccgtgatggagggggccccgtccctgtgcaccgtgggaaggttctcccatgccaaagggatggaccgcgccgtcaggctggccgcgcgcctggtggcaatggggatggaaaaactgcgctggtacctcatcggctacggggatgaaatgtccctgcgccgtgaaattgccgcctgcggcatgcgggaacacgtggtcattctgggtaaaaaggccaatccctacccgtacatggccgcctgcgggctgtatgtgcagccgtcccggtatgagggaagggccgtggcggtgagggaggcgcagatattgggacggcccgtagccattacaaactttccgacctccgccgggcatctggaagacggcgtggacggaatcatcatcccgaatgacgaggaaggtgccgcgctggccctgttccggctgctgaaggatgacgcgcgcctggaaagcctgtctgcggaatgccggaggcgtgactacggcaaccgtaatgaaatcctgaaactggaggcattgatctgacatgggaagacggcttttgtatatcaccaacggcatcgccggagcgggagggctggaacgggtgctctccgtccggacgcgcctgctggcggaacggtacggggatgaaatccatatcctgacgctgaatgaagaaggaaaggagcctttttatgacttctggcccggcattcacgtccatgacgtgcgcatgcagggaaatcccgccgcgaggctgaaggcctgggcaagcggcgttcggaaggcggtgcgcgccgccaagcctgctgtcgtttccgtttgcgacgacggcttcaaggggttctggattcccttcctgctgacgggctgcggctgccccgtggtctatgaacgccacgtttcccggctgattcaggcggacggcctgaaatcttccgctctcatgaaactggaattcgccctgatgcggttcctgggaaaacgcttctcccgttttgtggtgctgacgcccggcaaccgggaggaatggcccatggcgaatgtggaggtgattcccaatcccctgccgttttatccggaggcaccctcttccggaaaagaaaaaagggtgattgccgtcggcaaggtttccccccagaaaaactacggagcgcttctggccgcctggaaaaaggcgcacggtaaatttccggaatggaaggtggagctgttcggagcggaaaaggacggagggatgctgaggaaagagatacgggccgcagggctggaggaaagcttcctgctgcatccccccacgcgggagatcatgcgggagtatctggcctcttccatctgtgcgatgtcttcccgctatgaaggattcggcatgatgctggcggaggcgatggcgtgcggcgtgccgtgcgtggcctttgactgtccctgcggtcccggcgacatcatccgccatggggaggacggccttctggcgcggccgggaaaggtggcggaactggcttccgccctggaacttctgatggggaatgaaaaactgcgctcctccatggccgcgaaagcgcgggaaaatgtgaagcggtacgcggctgaaacggtggcggcccaatgggacggcctgttccgccgcatccttcaggaaaggaaaggaggcaagccgtgatttccgtcatcgttcccgtctataacgcggaggcttatctttcccgctgcatggaaagcattctgaaccagacgtaccgggatattcaggtcatctgcgtgaatgacggttccacggactccagtggggacatgctggaagaactgcgccgccgggatggccgggtgcaggtggcttgccgggaaaactccggcttgtccgcctcccggaatgccgggctggagctggcggaaggggaatgcgtgatgtttgtggacgcggacgactggctggacgaacacgcctgcgcggacgcgatgaaagccatgctgggaagggacgcggacatcgtgttctggagctatgccagggaatatggaacggcgtccgccccggtgctgttctggcgcgaggagcgggtgtttgaaggggaatccatggaatggctgaggaaccggctcctggggccgtccggggctgaactggggcgtccggaacggctggactcctacggtacggcctggggcaagctctacaggcgttccctgttccgggaaggggaagcctccttcgtggacacggccctgatcggctccgcggaagacgtgctctgcaatctttccctgttccgggcggcccgcagggcggtgtacatccccaccaccttctaccattaccggaagacggcggcgggagccctgaccaagcggtacaagccggagctggcggaccagtgggaggaactcttccgccggatggagcggcaggtgcgggaaagcggagcttatccggaagcggagcaggccctgcggaaccgcatggcgctctccgtcattttcctgggcttgaacgtctgcgacgctccggcctcctccttccggaaatgccgtattctccatgaactgctgaaacgggactggtgccggacggcggtcagggagctgcctctggcgcctctccccccgcattggaaagcgtttttcctgaccgtgaaactgggatgcgtgcccggtttgtacctgttccttctgaccattaaaagaattctggcaaaatgacccctcaacgagtgctcatggtattcaccatcatgaaccgcggcggagcggaaacgatggtgatgaattattaccgccacatggaccgcagcaggctccagtttgactttctggtgcaccgggagacgcccggcatttatgaagaggaaatccggaggctgggagggcggatttacaggctgccgcccatcaccctgcgcggtctggcggcgtatcaggaaaaaatagcggctttttttgacggacatccggaatacaggatggttcacggccactgttccgagctgggctactgggtatatcgtgaggcggcggcgcggaacattcctttcattgcggcgcatgcccacagctctccggtaggaattgataaaaactccctgttccgcttcgtgctcaagcacctgatgcgtccctgcctgacccaccggttcacgtgcaacgaactgtgcgggcgctggcttttcggccgcaggggcgcgcgtgacgccatcgtcgtccggaacgccattgacgcggggcggttcacctattccccggaggtccgggagcgggtgcggaaggaaatgggctgggaaggcaggctggtagtgggccacatcggcaatttttcctggcccaaaaaccacgaattcctgctgcgcgtcttccgcgccctgctggcggtaaggccggacgccctgctggcgctggtgggaagcggcggggaaggagagggcaggatccggcaggaggcggagcggcctgaatgggacggaagcatccgcctgctgggcggcagggatgacgttgccgccctggtgcaggggatggatgtctttgtcttcccctcccggtttgaaggcttcggcattgcgatgctggaagcgcaggcggcggggctgcccgtggtggcgtccgaccgggtgccgggggatggagcggtggtcccgggccatgtgaattttatgtccctgaaaaaatcccccgccgcctgggcgcggaaaatagcggaactggcggacggctggcaacggacggatgcgtccgccttcatccgtgaagcggggctggacatcgtccgcaatgcggaaaagcttcaggaactctatctgtcacagggaggtgaagcatgaaccccctgctcaccgtcttcacgccctccttcaacagggcggactgcctgcgccactgctatgaaagcctgcggcggcagacctgccgtgattttatctggctggtggtggacgacggctccaccgacggcacgaaggaactggtgaaggaatggatgcgggaaggcgcgctggacatacgctgccaccatcaggaaaacggaggcatgcatgccgcccacaatgccgcgtatgaattgatggacacggaactcaatgtctgcctggattccgacgacctgatgccggaagacgccgtggcctccattctggaattctgggaacgtcacggaagtgaccgtgtggccggactggcagggctggatgcggacgtgaagacgggggaactcatcggcacggcctttgcaggggatgtgcaggaaaccacattgaccgggttttatgcggcgggaggccgcggagacaagaagctggtgtaccgcaccgcgctgatgaagcaattgccgccgtatcccgtctttcccggtgaaaaatacgtggggctgggctacaagtacatgctggcggaccgcgtcgccccgctgcttacgatgaacaaggtgctttgcctggtggaataccgggaggacggctcctccaggaacatgttccgccaatacgtgctcaacccgcggggattcgcctttctgcggaaggagggaatgaaataccagccctcccggcgtcggcggttcatggaggcggttcattacgtctccgcctccctgctggcccgcaatccgggttttttgcgggaatcaccgcgaccgttgctgactctggcggccctgccgttcggagtggtcctgacgggccttattctggccaaaaacggaagaaaggaataacggaaatgaaaatagcctatgtactggatgatctggacgcggcgggcggcattcaggccgtgacccgcgccaaggctgccgccctggctgccatccccggcaatgaaataatgctggtgacggccaatgattcccggcggaccgcttcctccctccctccgggcgtgaaggtggttcacctgggtgtgaactactatgaggacgactggaagggattcctgtatgtgctgaagggcattctggtccggcgcaggaggcatgcgaaagctctgcggaaggcgctggatgaactccgtccggatatagtcgtctccgtcgggcagtcggaaaaattcatgataccgcgcctgtcgcgcgacaagccgtggaaaaccgtgcgcgaattccactactccggaacgtaccggaaggactatgcgcggcttcaggggggaatccgtgcgcgcgtaatggctgctctttccgacttctatgaattcggcctccgcaggggaacctatgacgctaccgtcgttctcacccggcaggaccgggaagaaaactggaagggcaggcggggagtgcatgtcatccccaatccgtgcgtatggcggccggagcgggttgctcccctggaacgtccgcgggctgtggccgttgggcggctggttccggtgaagggattcggcctgctggtacgcgcgtgggaaaaagtggccgccgttcatccggactggaaactggaaatttggggggacggtccggagcgcggttctcttgaacgcctggtccggggaaaagggctggaaaaaaacgtgctgctgcgcggagccacaggggaggtgcgggaaaaactgcttcaatcctccatgctggtattcccctccctctttgaaggcttcggcatggtgctggtggaagccatggcgtgcggcgtgccgtgcgtggcttttgaatgcccgtgcggtccgcgggacgtcatttccccggaagaagacggcctgctggttcctcccggggatacggacgccctggcccgcgccatcatccggctgatggaacagccggagctaaggagccgcatgggggaagccgcccggaacaaggcggcccgttatgcgatggatgccgtctgcgccgcgtggatggacctcttccgtcaattaaactcttcttcatcatgctaacctttattttcataaaaacatgccgctcgtttccatcatcattccctgctacaacgtagcccccttcatgaaaaaatgcctggataccgtctgtgcccagacgctccgggacattcaaatcatctgcatcaacgacggctccggggatggaaccctggacatcctgagggaatatgaagccgcggatgaacggttcgtcgtcatcgaccagccgaatgcgggcgtggcggcggcgcggaacgccgggctggatgcggcttccggggaatacatcggctttgtggacccggacgactacatttcccccgtcatgttccagcgcctgtatctggcggcggaggaataccgggcggacgtggcgtgcatgggggcgacgattgcgggggacatgcccctctccgtccgctggagcatgctcaacggcctgcaatgcccggaatggcattgcggtaactatgacttcacgacgatggggccgttcagcgaactgtgctgggacaagctgtaccgggcggaattcctgaaaaagacgggtcttcgcttccggtccggaatgaagcagggcagtgacgccctcttcaacaacctgctccagccctatgtgaaaagaatcgtgaaaataccggactgcctgtacatctaccgtcctacccgcccggactccctggtgaacgtgtacaaggccccggacaaaaagggttccggcttttatccggctctggaacgcatcgacctgattgcggcggcctaccgggaacagggcgtgctggaaagagccgggattacggtgctgaactggctgaacggcagtatccagctcttttcctccaacctgttgaaccagacggcggcagaaaaaaaggaggccctggacgccgtccgggcgctgctggacaaatatgaatggcgtgagttcgtcaaatccccggaatcccccttccgcctgctgagacacattgccaaggggaacgatctccgcgtgcggtgcgccctcttcggcatctaccgggtcctgcattcccgcatggggaacaggctggtggacctctgcacccgcatcatcaacctgcgcggaagcgcccggtagggtaggggtggtgccggaatgccttactttctggaagaaaaggccgcgtccggctgcgggcggagcaggcaatcataaaacggagtgtaaagcagattgttgggaatcaggtaaatatacccttcccgggaatcatagaccatgttgaaccgtttcagcaggttgttgcccatgacgccgtccatttccgcgatgctctgaataccgctggtgacggtggagaaggcgccggggatgagcggaagcttgcagccgcccagttggatgctgtcgaacatgacgttttccagaaccccggtatgggagtccgaactggaaatgcgggaagtggaaaagggcttttggctgcccagcaaatgatgttttttgatgaaaggcgtattgaggtccagaacgcggtcggagccggtatccacggataaacggagctggtgggtttttccgttgaccgtcacttgtgcggggacaatcggaacgcccatcacgtactcaatcttcaggcggatggcattcgccggcggcgtataggaaccgtgcgggtacaggtaaatcttccggtccgtgtaattcacttccgttacctgccgttggatgaaccagaggcccagcacgccgtcccactggtccggtgaatagggaatggcaataaagggaacgtgctccaggcttcgtcccccgatggtgaatttgttctccgtgcttccgcgtacttcatcggaccccgtggcgccatggttgacgacggtctcgttgaattccattggaacgcctttcagggaattggtgctgatgaccatggatgtggctccggtatcaaaaagaaaacgcaggggacggctgccattgacgctccccttcacgtaaatacggctggcagtgcccagctcaaagggaatgctgccgctgggggtattcgctccctgggcggagagaagggaaaccagtgaaatggtgagaaacgacaggatttttttcatatgagttactccctgtgtcaatgaagttgtttttccggaacaggcggctggagcatttggtggtactggctggccaacggatgcccgtttctatagcaaaggcttcaagagctaacaatataaaagaagaatcctttatttggagaatggtttttatcgcatggagaggcggccaggattttctttgagaaaaagaaaaaccgctgcaggttggtacctgcagcggttgaaacggtccgtaggactgtccttgaaatttgtcttagtatttgatgactggcatgaaggctatattgacgggacggttttcttcagcagtgggtacagatttggatgcatcaaaagtccattgtttagtagtattgtttaacgtgccagtacttgacatagaaactgtgtttcgatttgtcgtgtcttggatatacccgaaggcgccttctaaattagtcgcccagccttgagatttaccagttcccaaaaatccaaaggctcctttaatgtttctgatggcatccccttgcacgctgcctacagttctctctgtagaagtggaacggatgaacaacccgctgtctcttgtcaagtcgggaagggcgaaggtagttacgccatcgccgccataggtggtgctgattgccgcgtacaattccggatactgactgatttggagagtcgtgccattgcattccagccagccgttcggggctgtgctgccgcagaaccacatgaagcagccaggaggcacgctggaaccttgcggaccttcgggacctgcatcccctttatctcccttgtcccctttggggccctgtggaccggcagggccctggatgccgggttcacccttggggccttgggggccttccggtcccggggctcccggatcgcccttgtctcctttaggtccttgaccgcctgagttccatttttccttttcctgtgccgtgacgtgaatgcttgcgtttcctgcatgagcggaaaattcattctgcgtggtcatcaggattccgttaatcgtgataatctcattcatgattgttgtctaattggttcgggataaccccggctggtgaacatcctgtttttcctgggatacatatctcctgattattcgggaacctgtttcaggacagacaccttgcgaaaggaatttgcatgtatttcaaaaagaagtcatcccgcatgcaacgtcaggcggaaacgccaaatgggcagaatacaacgattccacgtgcttttctccttttcctaatttttccgcattgacgcgggctcatggatagaaagacccacatccccatgatgttgagaggcaggtggacggcaattatttcaatatgcctgaaaatgaaaaaccgccgtaagcttttcaacttacagcggttaaaagtggtcgggttgacaggattcgaacctgcgaccccctgcaccccatgcaggtgcgctaccagactgcgctacaacccgataaaatcggaccgaccggggccgtgtcttgcgacggcgaggtgtatataggaaaactttagtgttggcaagagtcttttttcatagcatatcttttttgtcatgaagcaagttcaagttgcagtcgtcggggccagtggctacaccggacaggagttgttgcgcatcctgttgaatcaccgcggagtgaagctggtgtgcgctacctcccgccagtatgccggacagccgttgtgggaggtgtttccccgtttccggcaggttccgggttccgacctgaagtttacggattccgatgtggacgcgattgccgccacgggcgcggaggtggctttcctggcgctgccgcatggcgtggccgcttcctatgcccgcggcctggtggaccgcggcgtgcgcgtgattgacctgagcgcggatttccgcctggacagcccggaagtgtacgaggagtattacggcaacgcccatccggatacggccctgatgcaggaggccgtgtatggccttccggagtggcgcagggaggagattgcccgggcgcgcatcgtagcttcccccggctgctatcccaccagcatccttcttcccctgattcccctgttcaaggccggcattctggagccggaggacgtcgtggtctgctccggcagcggcgtgagcggcgcagggcgcaaggcgtccattcccctgctgttctgcgagtgcaatgagagtttccatgcttacggcgtgccgaagcaccgccatttgagcgagattgagcaggagctttcccatgccgccgggaagacggtggtgatgtcctttaccccccatttgattcccgtgaatacgggcatttgctccaccattacggccagggtgaagaagggagcggatcccgagtccgtcggccgcctgttggaagaagcttatgcggcggctccgttcgtgcgccttctgggccgcaaccagcctgcggataccaagaatgtgacgcggacgaattgcgtggacatcggctgggcccatgatccccggacgaaccgcgtgattctgatgagcgcggaggataatgtggtgaaaggcgcgggcggccaggccgtccagtccttcaatatcatgtgcgggttcgatgaaacggaaggcttgtgggtcctgtagttttttgatacgctggaaggcacttcaagacgatgaatgattcatcctatattccggttgacgggggcgtttgcgcgcctcagggctttgtggggagcgccgtaagctgcggcatcaagaagcctacggccacgcgcctggacctggccctgatttattccacggaaccctgcgtttccgcaggcacgttcacgaccaaccgagtgcaggccgcctgcgtgaaggtgagccgggagcacctccggaaggggaatatccgcgccatcgtggcgaacagcgggaatgcgaacgcgtgtaccggagcccagggtgtggaagacgccaggggcgagtgcaggagcgttgcggaacttcttgggctgaagcctgcggaagtggccgtgtgctccaccggcgtgatcggcctgccgatgcccatgatgcgcatttacccgaagttcccggaattggcggaaggcctttcccgcgacaaggggcacgaggtggcccaggccgtgatgaccagcgatacgaaggagaagatcattgccattgagttcatggtgcagggcaggcccgtgcgcatcggcgcgtgctgcaagggcgcgggcatgatcaatccctgcatggctaccatgctgtgctttattacgacggacgcgggcatttcccgcgacgtgctggagctgtgcgtgcagtccggcgtgaaaagttccttcaattgcatcaccatcgacggcgacatgagcacgaacgacacggtgctggtgatggcgaacggcgcttccggcgtgaagctggaatccccggaagatatttacgcgttccagcaggctctggcccatgtgatgctggagctggccaagcatatcgtgcaggacggcgaacgcgtgaccaagtttgtgaccgtgcatgtgaccggaggccgtacggaggatgaagcgaagaaggcggcggaagccgtcgccaagtcatccctggtgaagagttcctggaacgggaacgatcccaactgggggcgcattatccatgccgtgggctattgcggtgcgaaggtggatgaagagaagatcgacatcgacatcgccggattggccgcctgccgcggcggcatgcaggcggatactccgtcggacgatttgcggcaggccgtgcaggtttccgcattccaggtggatatcaatttgaaccggggcgagttttcccatacggtgtacaccacggatttgtctccggagtatgtggacttcaaccgttccgagtacgcgtattggaaccaggcgaaggccgatggcctgacgcattaaccgccgcagtcatggcaccgggaaagtgccgtcatggaagagcggagggagctgttccctccgctgaaatgctgatggaagtgcggcgccttctggatgaaggcgctctccgggcttcccgggcgcagcgttcctgcacgggcgtggcggactgttgccggttccggctgacaggagagacgccgcatgtgacgctgggggaggcgtggatggcctggaaggcgtggcgcgccgccggacgcacgcgcgtggagctgccgccggacggaagctgcccatttctgaacgggcaggggaagtgcatgatttaccagggaaggccgctggcgtgccgcactcatttctgcatgtctgcgggtggggccttgccccggcgggaagtgattgatctgattcgcgctcttgaggatattgacgtcgtgctgggcggcgatggcgcaacacggctaccggaggcggtggaaaggttgtcccggaaaggcccggcggacggtgggaggaagaggcggcggtgatggaatgcaacggcttcttgatgaaggccgggggccttcaatcccaggcggacgttttttctttaagccatggggatatgttttttccctgcgttttttgatggctgctgcgctgcgaaaagggattctccgattcttgtaaaaagaagaagcgttttttcaggcctccgcatccggttttttctctttttcctgcttggaggccaggtggcgcagggcgctggcggcctttttgttgccgtgcctgacggctttctggtaccattccgccgcctgttcgtcatcctgcggaatgccgtagccgtgggcgtagcagttgcccacattgaacatggctgtggcgttgccctgttccgccgccttgagataccatttcaaggcttcctcccggttgacgggcgttcccttgccgttcaggtggcaccaccccaggttgagctgggccgttgtatggccctgttcggcggccttggtgtaccagtggacggctttggccatgtccacttccatgccccggccgttgccgtagcaccagcccagcgtgtattgggccgtgatctggccctggagggctgatttgtggtaccataccagcgccttgtcgatattcggctgcacgccgaaaccgttttcataacaccagcccaggttatactgggccgtagcgtggttctgcatggcggcctcctcataccagtaggcggctttttgcggattccggggagtgccgcttccattgccgtagcaccaggccaggttgtactgggcacggggatccccctgttccgcggcctgcttgtaccagtacacggcctgttcccagtttttctggctggcgctgttggcgtaaatccagccgaggttgagctgggctaccgcgtgaccctgttccgccgcttttttgtaccaggtgatggcctggttttcgtctttttccacgcccagcccgttgatatagcagaatccgaggtcgaattgcgcggtgggatggccttgctcggcggctttccggtaccagtaaaaggctttgtcattgtcctgcggggcgcctatgccgttggagtaggcccagccaaggttgagctgggctgtcacgtggcccagttccgccgcctgctggtagcagtagaaggcttcctgctggttttctgctaccccgcgcccctgttcataactgatcgccagttgaaacagtgcctgggcgtctcctttcagggctatctgctgaagggtttctatgtcgacggaataggtcgagacggtgctttccagctcgccgtggttgttggaagcgtcattcatttcacaggtaaccgcactggagaacattggaacaattcatgctcttctgaacttatgcgtttcccgattctgcacatttccccggcaagaatcaagacccgtttttgagagagaaaggagttcggatggccttaccgcaggatgcgcctgcggcgggacacggcaaggaatacgccgcagagggagagaattccagtgccgggttccggaatcctgaggtctcccagcggggcggtgaagctttgaagttcgcccagccgcgtgccggtcaggcctgcttcaccgtaattatagccgtacacgttgttttcaccgtccacgctggtcagatagatgtgtttctcatcgtccacgataactttctgccggaacattcccaatgcatagtcatcggaatccgtcaggtagataatcaggttcccgtccgcgtccatatcatagccccacatggtgatggcgtggccggttccgtactcgccgatgctgagcgtggttccccagttgttgttgatgctgtttttcaaaacgctgtagattccgtccctggtatcgccctcccagaaggtgtaggaattgaatagcggggtgttgtccggcgttccccacttgtcgtaggtcacggtcaggttcagctctttccagtagcctccttcggaggaggggttgtccctgatcgtggagtcggtcccataaaaggcggagggaagcattcctccgttgaaccaccagttgtaagcctgttccacggaccctcccttgtcagtccagctcgtcgccagggtttggtaaatgcgcagctggcaggcttccggcatgttgccgtaagtggaggattttccgttgggggtcgtaggtgagaggtcgcttctggtattctgccaccattgaagaacgttggaggccgccgctgcccagcagagctggctgtctacgggattgtccgggctgtagtagccggaaggacggtctgtcatggaaccgctgccccacttccatttggttttcttgttgcagtcataccatccgccggattcggagacgttttcaaggaatacgggcgtggcatggagtgtttcaggaagaagaaacagcgccagcagcgctagggaaaaggaacggggattcatcggaaaagcagagaggaattcccatattgctagataaaagcctgaaaaacgtcaagataataataattattcttccttaacgggcgagaagccacggcgccgtgggggcttccggcatggctgctacggcggcgggcgttccttccgccacgatgtttccgccatgtcttccggctccggggcccatgtcaaccaggtagtccgcggcgttcagcaggtccttgtggtgttccacgcagaggatggtgtgcccggcgtccctcagacggaaaagagccgtcagaagaagggccacttcattgaagtggaggccgctggtaggttcgtcaagaatgaagagggcgcgcttgccgtcctccgccagtttccaggccggggccttggccagctccgcggctattttgatgcgctgggattccccgccggagagggtgtctgcccggcggttgaggctgaggtatcccaggcctacgtcctgcatgcttttcaggatagcggcggcccggggcagggaggagaagaattccgccgcttcatccaccgtcagcgccagcgcctgggcgatggattttcccttccaggtgacttccagcgtttcccggttgtagcactggccctggcaggcgtcgcagggcatcgtgacgttgcccagaaagttcatgtccacttcaatcatgcccgtgcccaggcaccgttcgcagcgccccccgcggatgttgggggaaaagcgcgccgccgtgtatcccctttgcttggaaagagggagctgggcgtaaagggggcgcagaacctggagcagtccggtggctgtggccggcgtggagcgcggcgtcctgccgatgggcgactggtcgatgacgacgaggcggttgaagtgttccgagccctgcacgcggcgcggaacgccctttttcccggggatgtcctgcctgaccgcgggaatgaggcagtcccggacaagagtggattttccggaaccggagggcccggagatgcaggtcagcgtgcctaccgggatgttcagggtgacgttgttgaggttgtgcttgtccgccccggccaggaccagatgcccggtgggaaccgtcctgtgtccggaggcgggcatgctccgtttgccggagagccatgctccggtagggctctcggcgttttccagaatttccggaaggggaccttgcgccagaatacggccgccgtgggtgccggagccggggcccatgtccaccagatggtccgccgcgttcagaatttgttcgtcgtgctccactaccaggaccgtgttgccctggtcccggagcgtccggagcgcgcggagcaggcggtccgtatcggcggggtgaagtccggcagtaggttcgtccaggatgtaaaggaccccggaaagaccgccgcccagctgggaggccaggcgcgccctttgcagttccccgccggaaagagtgtttgcctgccggtccagggagaggtaggaaaggcccagttcgttcaggaagcgcacgcgcttgttgatctccttcatgagcgggtccagcgccgccgccagggaggcgggcgtcttcagccgttccagctctccggccatgtcttccagcggtagagccgtcagttccgccaggttataggcgcggtccggcgtgtgcatggtgacggccagcgccaggggggagagccgcaggccgccgcaggcggagcatgggcctttttcccgctcattcaggccggagccctggcaggaagggcacgcgcccagtggagagttgaaggagaaatggcggggcgtaagctggggaagcaggaagcccgtttccgggttgcggtagcgggtatggaaggcctggacggtagtttcttcccccggcctggtgatgatggcccgcacctcgtccggattgatccggagggccgtttggagggagtccgccaggcgggaggccgtgttttccccgcggacgatgatgcggtcgatgaccagggcggcatccggcgggggaggagccggggagcctatttcctcaatatcctgcatttccccgttccaatagacccgcagaaagccctggcgctggaagtcgcccagagtcgccgcaggatcctgggccagcagggcttccgccggagcggccaggaccaggcgcgtctgttccggcagggagacgagttcctccgtaatctggtccgggcttttgcgcaccagttccttgcccgtttccgggtcatggggagtgccggcagccgcatacaggatgcgcaggtagtccagaatttccgtgatgctccccagcagggtgcgagaactctgctgcctggcggattgttccaggcacagggccgggggcagtccggtgatgctgtccacctccggcttttccggctgttccatgccctgcctggcccgtgccgaaagacaatccaggaaacgcctgcgggattcggagaaaagcgtgtcgaacgccagggaggattttccggagccggaagggccgctgaacacgatcagcttgttggatggaaggtccagatccaggttccggaggttgtgctggcgtgcgccgcggatggagatgggaaggttcatgtcacgtaagccgggtaaaggagccctggtgcgcccccccttcctcaatgatgaggcggcgcgccgtgatgtcccccaggaatttggcatgccggtggatggtaacggtttcatccgccgtgagcgttccttccagggaaccctgtatccagatgttttccacctggatggctcctgtgaccagcaccgtcgtctttttttccaccaccagcctgcgggcggagatggagccggagatgtgctggtccgttttgatcttgcagacgccccggcacagaaaatcgccggacgccctgccgtataagaccaggtcccggcattcgatgttcagtcccttcaggtctgcattggcctgcacggtgacgcttccgcaggtctgcaccttcgttctgtgcgtcctgctgtgcaggataacgtcgtccagcttgatgtaggcggagcagtgcccgcatctggcggaaacggccgtgacgggaacggaagtgtttttgcggcaggaaaagcattccacctcccgggtgggcgcaggcctcctttccgcggctgccgggagcgtccagggcggggccggagcgggacgcctgattttcccggaaggcgcgctgctggtccgtggaacgggatggaaggagggagtcatggaacaaagagggcggcaaaagaacgatccgttcctttgacgcccctgaaaatggctggtggaaggtttttcttattccgcgtcaatgtccagcgtgctctggctggtcggggcgggggcttccggttccggagtgaaggtatgaacgggggccgctttcttcgcggcggaggctccggcggtgcctaccgtgggggcgcctacggtggaatggccgatgaagatcgcgccgccttcaatagccagggaggcggcctggatgtcgcctacgagttccgcggtgcttttcagttccacgcggtccgtaaccgttacattgccgatgaccttgccgtggatgatgacggacttggtgttgatttccgcgcggatgacggcattctggcctacggagagcaccccttcggaagaaatgtcgccttcaacggtgccgtcaatcagcaggtcgtcggaaaaacgcagggagccgacaacctccacgtcggagttcagcacgttgcgggtcagttgctggacgcgcgtagtgggggcgtaggaagcgggggagggtacggcttccgcaaccggttcgggggtgtcctggctcttggctacgtccatccagctgggggtggattcaggattcttgttgcccttgggggcgggaacggtggtgaatgatccaaacatggcgttaaaaagagggaggggtgaaaggtaaggtgggagttcttgaaactcgtccggtttaatgtacatcacccgcttgtggatgtgaaacaattttctccggaagggataaaaaaatgtgtctgttttttatcgttgcgttacccttggcgttccggtagtgtttgaccatccttccgcagttgttttctgtgggtatttccggtttaaaatgagtgatttatctgacaataaaccgcccctttcccctgccgcgcgcaggagcggcggaaaagcgggcggcgcgctggggcgcattctttccgtcatcttcttcatgatggcgctggggctgtttttcggcggcctttttttctggctccagaagcgccaggcatctcgggattcaggggccgccgcgcggatttgcgccacgccggagatgctgtccggggaattgcaggccacgctgaaggacaaggtggactacagtttctggcctccctgccacatccccccgatggagcggcaggacctgctgcgcaattgcctggtggaggcgcagaaatatttgagcgctccggacgtggtccagaaatcctccttcgtgtggaattccctgcaatcgcttcctttgatggtcaggcattacgccgtatctccgcctgaggtgattgccagcaagcccgtggggcctaaaagtttcgccgtgcttgaggtggaggggcatccctgcgcccagctgctgataggctttgaaaagacgcccgacatggaattctgctttttcaaggatggacaggatggcgcctggaagctggactggcagcagttcgcccgctaccagccggtgaactgggaggattttgtccgtggaaaaggggaggacatcgcgggattccgcgtgtggatgatccgggaccgcatgtcggagaataaggacaactacgcgttcaagctgatcgctcccggaatgaacgggtcggaggagcgcagcattgcgcggcccatggtttatgttcccagaaaatcggaaacgggcaagcgactgtttatgctgtttaaaatcaatgaggaaatggagcattccccataccgggtgctgaacgctaatgacgaacttgacatgctccgcgtgcgcgtcctgctttcccgcagcaaggagcccaaccgcaagggggaatattccttcaccttggtgaagctgctcggggaagggtggtatggcctttccgttgcaaataaatagtaacttgcttagaataggggactgccataggaatacggcaagtcccctgatattatttaccttagttgttgtggagatattgttacatctattcggttagatgttttgacttcttgtactggtcttcgcgaccaaatagctttgccattacatgctgctgaggctttgggccattttttaggatcgggagaaaatgcctcaactttgggggtgcgcactttagctattggagtcttttcatctgccttctctggaataaatcctggaagaaaccactcatattttagctctttcaaattcccttttttcttatcgtcattttcgcgcttcatgatagcttcataaggatatattgtatcttgtttacagatatttggccctgataaccgcatttcatatgccattacagttgggattgacaagaatatgatacataataatttagtcttcattttcttttgtatttctatttttgtatgatttcgagatttcttctataagttttttctggtattgattttttaatttatctagttcagcttggctcatagaagaaattttctcttgcagttctaccagttcaatttttggtttaactttactgtttggtagataacttttccaatcgagacccatgtattcaattacttcgcattcatctacagtgagaggtaatgttctaggactaaatggaaagaattcttgtgacctgtatatagcatattcatcttgtttgtgataccactcttccaagaattttttttgcactgcttcatgatcttccgatgtccatatattcaatatttttttaaattctgtttctttttctattgcattcaagtggcggtataaagataagagaaaacttctttcttgagaaattccctttggtgtaatcgggatttttttattaagaagaaaaacatctttattattaaatatactattcattttttcttttaaaagatccatgcggctaatgaaaagcccgtttagtatagcatcgcttgaataattattaagaattcgtatgctgtaagtttcgggaccggacagaatgaatgttttgtagacaccactaccatggaaatccttcactcggctacgtgcaagaattggagccatttgaattttttctccttcatcaagttttccggatctaacttcaataataaaatccctccaagttcctatattatgatctttaccttgataattataaaaatacagtgaacaagaatggtatccttctggtacttgtatacttgtccaaatatcgggcccatcaaatttagatgcgtattcttctccattatcggaccattctgttgctatacgcgtacctgttttcggattaaatagtacattaggatttaatgacgcattatcattatggggacgtacagacaaagaatcttctttctgcttatgaaatcctaatatttgattgctatcaattttaacatccaaattggctataatatcatttcccatattgcaggtcccgcacaggagagcataatctttgccgtaatatccataccaatctccttttgtcgcccagtcctctttccatgcgacagcataggggattttttttaccttatggttgttttcctcatcaacaacttggttaagtttaactgcttcttgattcagttcatcacgagttttaatagaaggaataggcgggaaagatggaaaatcctctctctcagcgacttttaattgatttcttttcttctcttcgtgtattttgataatgccatgtccatacgttgctgcatatacgcttccgtttggtaaagtaagcaacgatttcacaaagggattcttaatattttttgggaatatacctaatttattttttttcagattgagcggattaattaaaacagctcccttttggcggaatccaatccaccatccttccttggtttccgctaaacaagtaacatagtcctccggtaggagcgacactcctgctttggaagaaatatcccggtccactttgacattccataatccctggtttttgtcacgacaatcttctccccttaggtatttccaactacttgtaccttttttgaaggccaagccactgttagttcctaaaaggatatcgcccttttttgttggcaatattgtattacataaattcgaaggaagacctgaaccaaaactttctataggttggcgtacccggttctctttgtcccagtaccactttgcctgttcagtattgataatcttataattctgttgttcagataattgagaaacacctccacatgcataacccagccaaaggtttcctttatcatcataggcaagagtttctacttgatcttccaccaaaccctctgcacgcgttagattgagccattgattcgtttgtggtttaaagacattcactccaccggaggtagcaatagcaacgtctccagttacaggagatacggctatgtcaaaaatacgttcaccgagcaaagcattttcacgattgtaggttttccatttctctccattaaatactgataccccttcattatccgtgccaacccagatgcgaccttgtttatcttcagcaatggaataataattggtttcttttttaagaccatgataataggatatgtccaaccagctttcttttcccgcttgcgctttttccaaaggtttcagacagtagattccctgtccttcgctcgttatccagattgaaccatcagaagctaataggcaatcagtaagatattctgcgggacacggcggcagttggtcagaaaattctatagtccgatcttttccatagactgatgataaagaaatcagacacgcgattaaaattctttgtattctctgatgtaatttcataattatctaattaaaaagttaatattaattggcatggctatttctaatatttatttttgcagggaatggtaatattccagatcatgtttattttttgaaagagtagctatatcaattccaactttgatcaattcatttcttatccctgtgatattatcggtttcctccttgagaagtctttttaagaagatatttccgagttcaatcaatcgtggatcattccacagtttttgacattcagcatagaatttgagatgtttgattgactcggagctgttgggtaataatccttcaatagcttgttccaagataattaaggttttctttttggttgaaaattttattttattggttttgtagtataaaagccagtcactataaaatatacgccttttatgcacattatatattactttaccttttatttcaggaatatcatttgccaaacattttgaaaatgattgcatgtacaactgaatggcggagtcttctactcgttctttttgtataatttgagaaattattttatatttatcttgttttttaagattcaatggtatgaattgatcaagaagatattgtgctgctataggatccttacggaatgagtatacaattttttgagctaactgatatttcttttcagtggatatctgtctggattgcatagaaataaaatcctgccatgcagcaatatttttaccatatgctttttcgatagctttacgggataaaatatttttattaatattgtttttgcttaagctggagtaagcccggcataattccgaatctcttgcttcatttaattgctcaaatctcacaaaggaagaaattattgccggaggtccttcccatggagacatatttgaactcccaggaagtttccaaccggagtggcccccggaccaaacccagccataaatattatttccgatgacccattcaccagatagatttttgtatacaaaagcacagtgtcctggttgtccgatcggataagctggaacgccgcgggacgctaaaaaacctgcagctcctttagaaactgctccacaaacacctccatattcatttaaaatagctagtgtcgttggtttgtaatcataaaatggagctccggcatgtatactgactccgtttttatttttttctctgtagggaatgaactgagttgcgctgcctgcactttctgatttgaatttatttctagttttactaaatctctgtccccattccaaatcttcaacgttatgatggtggtggtagagaattgccatttcccaagcgtttagatgatcatattgcttaaataaatctccattatttcttgattttttataaaattcatatctctccagactttgttcaagtccttcttttaattctggatgtgcttcaagtccgcatcctaaagcagagaccaaatcaattccctcaagctttttgttttctcttagccaaatttctctaatgacattaagagtaccgctattaccccggttggcttttgcgagttgctgaaagataactggattttttaataaaaaattacaaaattcattatcttgaagagcttcaataaaacaattgtttttcttggttatattttaaaaaaatctattgatataacaaacatgctcaatatctttgttttctaaaagggagttaagagattcttcatttagtgttttcgcatcaattgtctgaataattacccgttctgttacattactcactaatcgcgcactaccactatgcaatgcactttttacttctgcaggaacttctgcagatgaaatctgtagagaaatagaaagtaaaatgtagaggaagttttttaccatatttttgataaaatttggtatgaaagatagcgtttagattagtatctgacttttttaaagcatctatttttgtaatatgggtgccaacacacatccttatccaaagactatcaatgaaaaagagaaattgtcaaacatttttttctgattgacgatcaatttttttgtttcaaaagtgcagaagagaatcaagaaatagatggaatcatcggcggcggaaatgggacggaagtccgccgtaagggggcctggggcggtagggacggcaatgcggacggggagacgggtacgccattccatgctgcggatgcgcggagcggcgtccgcggcagacgcccgcaggccagaaggggccgtgataatgcggcctgggattccaggcgggaacgtagcagccgcggtagatgcccctgatgacgtagatgggcatgcctgcgggggaataggcgtaaatgggccggccgcatgcggaatagccccagatagggaatccggaggagtcatacaggaggctgacttgtcctcccggggccatgcggatttcaccgtgcagatggattccggcttccgcaacggaaggtgggaaggccaggagggcaaacagggcgctcccggcgcagtaggaaaggaggttgtttttgacgaggttgtttttcatcggcttcttgaatgatgttcaggggcggttatccggtaaagcggaggcccgggactgttttgtgtaattttccgcgcccgttttccggacggcgccggagggtaatcccttcttgacctgcggggatagggcgggcaaagtggccgcgtgacgagattcagaccatgcattgatttacatgacgggcgcgtgaagcagatcgtgggcggttccctgacgcaggacggcgcttccctgcgcaccaatttcgtctccgaccgcggcgcggcatggtatgcggatttgtaccgcagggacggcctgcacggcggccacgtgatcaagctgggacccggcaacgaccttgcggcgcgggaagccctggcggcgtggccgggcggcctccaggtaggcggcggcataacgccggggaacgcgaaggaatggatttcagccggagccagccatgtgatcgtcacctcctgcctgtttgatgcggaggggaaatttctggaggggaagcttaaggaccttgtttccgccgtgggcgcggaacgcctggtgctggatttgagctgccgcagggttccgggcggctgggccgtggccatgaaccggtggcagaccttgacggagctccgggtgacggcggagacgctggacatgctggcggagcactgcgcggagtttcttatccatgcggcggacgtggaaggcctctgcacgggcattgaccgggaactggtggagatgctgggaagctggcgccgcctgcccatgacctatgccggcggaatcagccgtattcaggattttgacgagatagacgccctgagcggcggcgcgatggacgccacggcggggagcgccctggacctgttcgggggcggccttatcaggtacgcggacctggtggcgaggcaaagcgggaaatccgggacggaaaggcgcaaggcatgaagctggccctgaaagtcattcccaacgcgaagaagagcgaagccgcgggctgggaggacgatccccgtgccggacgcgtgctgaagctgcgcattgccgcgcctcccgtggaggggaaggcgaacagggccgtcatcctgttcctgtccgcctggctggacgttccccggtccgccgtcagcctgctgcgcggagagtcagcccggctgaaagtggtggagctgccggacggctgcgcggaaaagcttgcccggctgctgcctgaggcaggcgttccggaagcttagggaggctggccggaaagccgccattcccttttctgcgtagatgagttgcatcatgttccggtcatcacgcgtcaaacgtcatccatgtcttagcaggccgttgacgcattcggtaaaagtatctacattgtccgcatgagcaacgaagagaaagagaagaacgcggaagcggaagagcaggaagttctggaacaggcccaggacgcccccgcagaggaaaaaggagcggaagcttccctggaagaggaattgcttaaatggagggataccgccatgcgcactgccgcggaatatgacaattaccgcaagcgcatggtgaaggaaaaggaagaatgcgccaagtttgccaaccagcgcctgctggaagaattgctgccggtgattgacaattttgaaatgggcatggcggcggccagcgcggacaccgcctccatgatttacatcggcatgagcatggtgaagaagcagttggacgaatttctttccagcaatggcgtgagcgccattgaaccggtagtgggcagcatgtttgaccacgccacggaggaagccctccagcgcgaaccctccgaccagcctgaaggcaccgtgctccgcgtcatccgcaagggatacaagctgaaggacaggcttctgcgcccggcaaacgtcgtggtggccgagactccggaacccgaaccgcaagtttgaccgtttttttaacattcacgccacatggctaagaaagattattacgagatcctgggcgtttccaaggacgccactgatgatgagatcaagaaggcctaccgcaagctggccttgaagtaccacccggaccgcaatccggacgatccttccgcggaagagaagttcaaggagctgggagaggcctacgaggtgctttccgatgcggacaaaaaggccgcttacgaccgcttcggccatgccgcctttgaacagggcggtcccgccgcgggcggcggctatggcggaggcgggttccaggacccgatggatatttttgcccagatgttttccggaatgggcggttttgcggacatgttcggcggcggtggccacggcggccagaagagatcctccaagaggcccggttccgatctgcgctatgacctggacattacgctggaagaagccgcgaagggctgcaccaagaagctggagattgagcgcctggtgacctgcaaggcctgccacggcaccggagcccgggatggaaaggaagcgttcaagacgtgtccctcctgccaggggcgcggcatcatcacccagcagagcggctttttcgtccagcagtccacctgccccacctgccacggcaccggggaaatcatctcggacccgtgccccgcctgccgcggggaagggcgcgtgagggaggattcccacatcaccatccgcattcccgcaggcgtggccacgggcagccagctccgcatcgccggggaaggggatgccggggtgcacggcggccccaccggggacctgcacgtgtttattgacgtaaaacctcacgatattttccagagggaaggcaacgacctgagctgcacggttccggttccgctttccctggccgtctccggcggcaggttgaaggttcccacgctggaaggcgcggccaccatcaagctgccggaaggcacgcagaacggcatgatcttccgcctgcgcggcaagggcatgaaagccctccgcagttcggacgtaggggacatgctggtggaagtggaggtggaaatccccacccagctcaccaaggaccagatggacaagctgaacgcctttgcctccacggtggatgagaagcgcaaccagccggcctgcgtggcgtttgccgacaaggcggcgcgctacctgaagaacaagtaaggtccgtttttccctttcacgcatggctcgcttttacctcccggcttcggaatgggccgctccctcctgggagctgcgcggggatgaggcgcaccatgccgccaaggttctgcgcctgaaacagggtgattcctgcgtcgtctttgacggccgcggccgcgccgcccatgccgtggtggcggaacctccgcgcagctccggggtgctgctggctccgggggaggaatgtcctcccgctccggaattggcccatctgacgctgtgccaggcggtccccaaaggagccaacatggacctcatcattcagaaatccgtggaactgggcgtttccgccatcgttccgctcctgacggaccgcacgatcgtgcgcctgaacgcgcgggaggcggaggccaagaggcagaagtggcagcgcatcgccctggaggcctgcaagcagtgcggccagaacacgcttcccgaggttgcgtctcccgttccctttgcggaatggctgcgccgcggagcgccggaagggctgaacgtgatcgcctccctggtgcccggcgtgcgcccggtcagggacgtgctggaagaagcccgctcccgctccgtgcggagtgctgccctgctggtggggccggagggcgactttacggaccaggagacggccatggcgctggaggccggattctctcccgttacgcttggccccatcgtcctccgggtggagacggccgccttcttcgggctggccgccatgcggtacgccctggactgagtttttcccgatacgcattcccatgttcaagaatctcattttcgactggtccggcaccctggtggatgacctggccctgacgctggacgcgtccaattacgttttttcccagtacggaaaaccctgcatggacagggatgaattccgcgcggaattccagcttccctatccggactattatgcccgcgtgctgccccaggcggatttgaatgaactggaagaccatttccggtacgccttccgcgtttccaacgcgccggtggaggtgctgccgaacgcgcgggaattcctggagttctgccgcgcgcgcggcgtgcgctgctttatcctcaccagcgtggacgccaaggagttcgacatccagtgccaggagctgggcatgatggaatattttgaagccattcacgcgggcatccgccataaggacgcccatatccacaccctgctggcccagcacgggctgcatgcccatgaaaccgcgttcatcggggacatgcagcatgacatagagacggcccaccatgcgggcatcacgtccatcgccgtgctgaccggctataatgacgctgcccagctttccaaggccaggccggacatcatcgttccggacctgcttgtcctgcgcacgctgatgcgccgctatgccctgccttcagatacgcaggattccatcaacatcaacggcctggagctggataccttcatcggcgtgccggaggaggaacgcgcctctatgcagaccctgaaggcggatatcactttttatccggatgaagccctctctggcctgaacgacgatttttccaggaccgtctgttatgattccatcgcccgcgccctgagggcggaagccatggcgcgaccccgcaagctggtggaaacgctggcggaggacatgggaaaggtttgcctgaaggagttcggcgcgcgtcacgtgatcgtcaccctgcgcaagttcatcctgccgcggacggacagcgtctccgtgacggtgcatgtttcacggcaccggtaaaaggggaggctccctaccggatatccaccgccttctccgcgggaatgtttttcccgtctttggtgaaggtgtttttctccgcctttacgttgccggtatggcgggtgcggatggcggtgccattcctgaggtcaaacgtattgccggtgatggtgatgttctcgtgaacgtttccttccggctggggggcgtgcggaacgatctggatgacggcctccccgcattgaatgaaggtgttgcgggagatggccatgtccttgaccacaccggattcataccagccggaggcgtcatcctccaccagaatggcaggcatgcccgtcttctcaaaccggcaccgttcaatcagcaccggcttcctggtggtaagcaggaagcccctggtgggaatgtggcggcaaaccgtgttgctgacgtggacggagggcgtccaggtggtgttctccacggcgtcgttgggctggatgttcccggggttgggctgccgcagcgtgagttctatttccttctcattgagctttttgatgccggaaacggtattggaggcgtaaggaaccagcgtcttgcaggaaacgtagtcaatccggtcccccaccgcgaaggcgtcaaaaccgaaggtctgggggtgcatgaaccggacggtgattttattgggtgccggctggtccacaatgcgcaggtgggtgccgtgcacgttgatggcgtcgtcatgggaggctcccagcacgcagtccctgacgatgattttccccctgcatccggaaaaatgcaggttgtccgcccaggaggaattggtgcgcagggagccggggcgcggcgctatcttcaagttattgaatatgatattctcgctgaactgggaaaccacgcccatgccgtgcatgtagtagatatggcagttgttccagacgatgttcctgctcctgtgctggaaaaatccgcagcagtcccgccgcgtgttgcggttctggtaggattgtcccgcccgcatggtcggggcgccttccttgaacgtgatgctgatttttccgggggacagttctttaatgactgtttttcccgggtcaaagcggccctggaaggtgccggaggcggcatcgaagaccttggaatatcctcccatccggaattcccagccggggccgcgccaggtcagggagccgtccttcaccgtatacagggtaccgtccggaatggtcgccttcatagtgtttccttcaacttccgtcaccaggaattcccccatggtagggtgcacgtagtcaaagcccaggccgttcagggaaacgttttccgcgtgctccatgcagacgaaaatggcttttccctccagcaggatgtcggtggctcccggcttgccctccagtcgtacgtttttggcctccaccaggcggatggccatagccttggcctcgttgggagcgtcattggtgttggaaatctgcggctttccggtgaccagggcgccgtgcttgaaaacgtgcctgccgggcatgaaccggatagtgaccggggcctgtctggagccttcccccatgagcgccagagaggccgcatgctctccgggctggatgacgagcgtgtccccgcgcgacatgatgaggcggttggccggggacatgctcttccaggccgtggagggggaagttccggggttgccgtcgtttccctggtccgggtctatgtaccaggtatggttcccggcggattgtgtgcgctgcgcccgttccgggtagtccgctgccgcgcacagcccggttagtgttgtgagaacaagaagcagggtggctgcgggagtttgcatgctgcactcctacaggaacacggctttcaggacaagcataatgcccgcagggccggaaggaaaggccgtggttttctgccctgcgcgccgggagagcggcccttacttttcatccttcctgccggggcgggaaaggaagccgaccagcttgtcatagtacgccttggacttgtcgtagtaggactgggggtcgatgtccagcttggtgcggaacagaagccagagcttgtggaaggtgttgacgcggtagcggatgtcgaagatgcggaagccgcccgccttcattttgtccagaatggtgtggtagatgagcgccatggcctgggcgggaacgagcgccgccctatcctccgggctgaggcggttgtattcctcctccgcctccgcgaagaacttttccgccaggtccgcttcatattgcagcagttcctgaagctggggggaatagactctgccgcgcaggtcttccagggtgtagccgaagcggtccatgtcctctctgggcaggtagatgcggttggatttgccgcagtcttccgccacgtcacggatgatgttcaccatttgcagcgcgtgccccagggcgatggcgtacgggtaggcggcttccccggcgcccatgatgcgggcggaggtgaggcccacgcagcaggccacgcagtaagtgtaatccagcagttcgtcacggttcaggggctgttgctggcagatgtccgaacggcagccttcaatcaggtgcagcatgggggtggtgtccagctccaggtcctggatgagggcgatgatgtcttcttccagctccgtcagctccagaacgtctccgccgttgatgacttctatccagcggttcagggcgtcgtggcgttctcggggcgtcattcccggttcgtccacgatgtcgtccaccgtacggcagaaggcgtaaaattccgccatgtggcggcgttcttcttcaggaaggtcaatgagggcgaaggccaggttggacttggccttgcttgtaatagtctgagcttgagtcatgtcttgacggggaaagcgtgcctgcggaatggccgggaatcaggggataagcccccagtgggaagtgaagggccacaggcagaagctggcggggcctacgatgttgtattggtgaacgggcccccagtaccgggagtcaaaggaatttttcacgggtggaattgtcgcccagggccacgtactcacgcaggtaggggcgttttttatcattggagaggtgcacggttcccccttccgtgatgtaggccctgccgtccagcaggctgaggggggcgggaagggccacatagccgcagggctggtaggggggcttgccggaagctaccctctggatggtccattccgtggccggttttccgttgacgatcaattgggaatcccggatggacagggaatctcccggtacgccggagaggcgtttgacgtagtgcgttccgccttcctgcccagtgctgcttcccttgttggcgatgccttcaatgccgcgcgtgtcaaagacgaagacttccccgcgctccggcttgcggaagtggtaggccatcttgttcaccacgatcaggtcaccggcgtcaaagcgggcgttcacgatcgtatcccccggcaggtagcttctgaacggcgtgtgccgttcggactcgaagcgcggttcctggttgaggaagtagcggcgcgtctccgcctccgccgccggaatttccagcttggagccgtcgtcgaaaatcacgttggttaccgtgagcaggaggtatttggtagcgggctcgaagcggacgattttcttttccttggaggccgtttcatgcacataggagccgccgtacaggatcatgtccccgattttcttcatcagggtggggtctccctcctgggggacggcgcggatgccgttcagggagggctgcatggagccggtcgggatgcggaagggctggactacataacagcgcaggcccaggaaaatggccagaatcacgaacagcacctccacgttttccgccagtccggagggcagcgcgccgggaatggattccagcgtggattccagtttggcagtgatggtttccacctgctgcctgtcaccccggcggagggccgttttcagcaggttgcggttttcttcaaactccgccaggcgctcgggcggcaaaaggtcgcggttgtaattgacgtagcggcgcaccgccttcagggccatgcggcctttcctgcgccatttgggcgtaaaccaggccaggggatggtccagaataaacaccaggatggcatctgcgaccgggaaatggtcgtaaagggcagctaggatggacttgtgcgggctgttcatgaagtgcggttgccatgatgccccgtccgggggcatcatggaagtctattttacgttacgggagtcccattttgcccggattcagcaaattccgggggtccagggcggatttgaccagttcgtgcaggtggaaggctccttctcccacggcttcccggaaccatttggccttcgccaggccgatgccgtgttccccggtgatggtgcccccgtgttccagcacccagcggaacagcctgtccacgcaggcgtccgccagggctttcttctccgggtccgcgtaatcgtccaccatgatgttggtgtgaatgttgccgtctccggaatggccgaagcatgcgatgtccagccccgtttcccggttcatggcctcgcagaattccaccaggtccaccaggcgggacctggggatgacgatgtcttcattcagcttggtcatgccggtggctttcaggctgtaggaaaattcacgccgcagctgccaaatggcttccgccttctcttccgtgtccgcgcgcaggatgtcggttgcgccgcattcttccagcaaggcgcagagggaatccagttcttcccgcacggcggcctgcctgccgtccacttccacaatcaggtggccgcggctgccggagggcagggcgctgtcccccaggtaggcccgcgcggcgcgaagggtgaagctgtccgttatttccagggcggagggaaggtgcccgctgttcaggatgcgctgcacggcggcggcggccagcgggaactgagggaagctggcgctgagcgcgccgaaggcttccggatgggggatgatccgcagaatggcccgggtgacgatgcccagcatcccttccgaaccgatgaagaggtccccgaggtcgaagcccgttttgttcttgtgggtgcgccctccgcattccaccacttccccgctagcaagcactacggtcaggcccagcacgtaggccttggtgactccgtatttcaggcacctggggcctcctgcgttcgtggcgatgttgcctccgatgctgcattccttcctggacgccgggtccggtgggtagaaccaccccagggcgcgtacttcccgctggaggtccgccgtgatgacgccgggttccaccacggccacgccgtcttccggggagatttccagaatgcggttcatccgttccagggaaaggctgatgcctccgcgcacgggaacgcagccccctacgtatcccacgccgccgccgcgggccgtgacgggaatgttcatggaggaggcgtagcgcaggagcagggagacgtcctccgtgctctccgggaaaacgaccgcctccgggagcacggacgcgtaccatttgtccccggcgtgcgcggccagcacatccggagccccggagaccttttcaggccccaggatgcgggaaatgtcttcttccaaagacatggattacttgagaatgggggtgcagaagcagtccgggcggtggaagtccgggttgccggaaaggtcgtccgccgtagtcaggaaaatctggtccggggtgtccaggatgaacgtggcggccagcttgcagtcgcgtacgtccacgccgcgcagttcgttcagcggaatgcgggccatggcgcaccagccctcgtccgtcaggatgcatttggtatccacggccagcggggcgggaatgtcttcattggcccggcgggtgtcggaaaaggcgcaggcccaccacgcgccgttgggcgcaaggttgaattcccagtaattggtgccgtccccggcggccatgaaccattccgccaggtcgtaccgccacagctccggcaggaactggccgggccgggcgtccggatggacggtggcttccttgctgcgggaggccaggaaccagaggtactcgccgtccgtggcgaaggcgaactccgcgcttggctccacgtcgtagccgaaccagtcgttgacgagttcctggcggggcagggaggcaagctggtcaaagcttccgttgaaggcccattggtgaatgattacttgcataccatcacatttggacagtttgcaggttttatcaagccagaacgtcttatggacttggatattgacgtgatttctccatcatgggctccgtcatgcattttcaaaggacgctgaacctgctttcccgcggaagcgctcccggttacctggccgtgttcatcggcggcttcggggacgtggtggcgggttgcctgagccgggtggaaaagaggtttcccggttttttgccgggagtggcgcatgccacggcctattaccactgggacgggggcggctgcggcgtgttcctggacaggtgcggaaaaattgcggcggagctggaagagctgcgccgggaatgccccgggctgcccatcgtgttgatagggcacagctacggaggctcctgcgcggtggaagtagccaggcgccagtctgttcaggccgctccgctctgcctcctgaccatagacgccgtggcgcgccggcagaaaaacgcgcgcccggcctgcgtggaatggtgggggaacgcctacttgcgggacgggggcggcttcatggacgtggtgcccaggatcggcggccgctgggggcactgcgccggggcggacgccaacctggctttttccggctaccggcgcgaccgggagggccgcctttattcccaccggaggcccgctcccatgctgtatgaagcccccgcggaagaaacgtgcagcctttttcaggcggcctccgcatggctggaaggccgtcttccgggctgaccgccgcggggcggggagcgctaccggtccagttcgtcccacttcaccagttgggaaagaagctggctgatgaggcgctccgtctgtttccgggcttcctcctccggcaccttgatcttgtccccgtacgcggtggaaatctggaagtagcaccagcgctggtccacgccgtacagcaccctgtccttcatatccgtcagggtacgggccaggtggtcctccgtcatgtggcggtggccgatgaacacgtaatagtgcatgctgtccagaatgatgggctgcggctggtccggagtgatgttctgctgggatttcagcttggtcatcctgataattccgtggccttccacgggcacctccaccttggttcccgtcaggttgaaatgaccctgggccggaaggcagcgttccgggcggtggatggagttgttcaggtcatggccggatttgacgatggagacgcggcacagcacgggagcggtttccggcgcgtccaggctgatggggacttcctgcacgtaatccgccttggagaattccgtgtccggagccaggatgccgcgctcctgttcagactcctgccggcgcgtgccgtgccagccgtccggattcatgccggtggggagggccatgctgatggacgaatcctgcacctctcccttgcgcggcatcaggtaaatgccgccgagcgtgacggccagcaggaggggaagggcgaaaatcttgagcgttttaatgttcatggcggcggaaacgcttagtgggacttgttcattttaacgaccagctttttgcgccgggacggcttccagatcagctccccggccagcagggagtggacggccgccaggccgagaaggcagatggggaagaagaacagcaggccggaccagtcgtgccaggttttcgcggcaaactcggggtccccgtattccgccagcaccacaatgctggtgatgcggacgccgttgccgatgacggccaggggaatggcgctgaggaagagcacgcattttttccaaaacttcaggtcggacaggtaggcccaggcggcggacagcatgagcagggccatcagggagcgcatgccgctgcacccccctgagatgttgaaggcgtcccagtggccgccggtggagcggatgttggtgccttgcaggtaggtatccacgccgaaaagggccgcacccaggtgccccagctccgtggcgacgatttgcagctccaccgtggcctgctggaaagagggaaggggaatgcacagccagaagaagagcagggggaaggcgcacagcctggcgatctgcggtccggccaggtaccaggctccgcccagcaggatcaggggaagcgcgcccacggccacgcggggctgtcccacgcggaaggagagcgccagaagcagggccgccgggatgaaaaggatcagcccgcgccagtccatgcgcctgggcgcctgggcaatcttctttctggcgtggtacagcatgaaggcgatgatggggaccaccagccagccgtgttcgtaatccgtctgcttgttccaggaggaaacgagccactggatgctgctttcattcccggtagagccgaattcgggaaacgccaggtagggcaccgccagcaggatggcgcacacggccagggcagcaatcatggggacggttagaaatctctctttggcatctggaacgggggaacccatcatggagaaaaatcaaattgtgagaattaagtattgcgattatgtggacctgtgttcagaatgcgtccgcttttcagtttccggtatgaagattatcagcggtacagcacacagagaacttgcggagcgcattgcgcaaagcgtaggcattcagttgacggacgtcacggtgaacactttccccgatggggaaagttttgtaaagataaatgaaaacatccgcggcaaggatgttttcctcattcagcccacctgcccccccaccaaccataacatcatggaattgtgcgtgatggtggacgccgcccgccgtgccagcgccggacgcatcaccgcggtggttcccttcttcgggtacgcccgccaggaccgcaaggaccagccccgcgttcccattaccgccaagctggtggccaacctgctgaccgccgccggcgtggaccgcgtgctgaccatggacctgcacgccgcccagatccagggcttcttcgatattccggtggaccacctgtacgccgctcccgttttaatccgccacttgcgcgagcactatgtaaaagacctccagaacctggtcgtcgtctccccggacgtgggcggcgtgaaaatggcccgcgcctattccgacgccctgggtgcggagctggccatcgtcgccaagcaccgcgtcaacgccacgcatgtggaagccatgaacgtcatcggtgatgtggaaggccgtgacgccgtcctgattgacgacatgacggagaccgccggcaccctgtgcgccgccgccaacatcctgaaggagcgcggcgcccagcgcgtgtttgcctgcgtgtcccacggcgtgctgggggacatggcccgcgaacgcattgccggctcctgcattgaacgcgttcttacctccgacaccgttcccatggcctatggccccaaggtggactgcatcagcgtgggcgacctgctgggccatgccgtgcagcgcatacatgacggagaatccgtatcatcattatttgacatttagccaattttagtgcagagtcctgcgccctgacctgagtactggtttacgcgggttcagaaatcccggcggggcctctgcctgaacccgattaggaaacattatcaatcaacactcaatattgcctctataaaacatggctacatcccattccctcaaggccgaaacgagagcctgcggctccggtaatctgaagcaactccgcagccagggcctggtccccggcgtggtttacggtcccggttttgacaacgtcaatatccaggttgacgcccgcgaattcgctcgcatgctggcttccgccgtttccgaacatatcctggtggccctggacattaacggcaagatcgtgaaggccctcctcaaggaagtgcagcacaaccccatcaccaacgcctgcctgcatgtggacttccaggccgtgaccgacaccacggtcattcactccatcgttcccgttattctggaaggcgaagccgccggcgtagccctgggcggcgtgctggaccagaccattcatgaactggctatcgtctgccaggtgaagaacctgccggaagccattactgccgacatctccggcctgaagctgggtgaaaccctgcgcattgccgatctcaagctgccctccggcgtgaacacggaactggccggcgacgtgatcgtggccatcgtggaagccccccgcgtttccagtgaggaagccgctccggccgctgaagaagccgctgccgagaagtaagcctgaaacagcctgttttttatctctccgggcccggaaccgtttttacggctccgggcttttttttgtcgccaagagggcgtcttctggtaaagtgcaagatacgtattcgtcagattactctggaaaaaagccttagatttatgaacaagtccctcatattggcgttgaccgcactcgttccgcttgccgcggcggatgaagtaaaactcaaggatggaaccgtttacaaggattgcaccgtggaggtggaaacgccggaaagcgtcagcctcctggtccccgtagccggcgggatcaaggattccgtgaccgttaaaagggaactgattgaatccatcaagaaggcgactccggatgaactggaggccgccaagatcaacaagacgtacgccaagccggaaaccatgaacgccaaggacctggaaagcgccctggcggacctggacaagaccatcaagaagaatccccaggggcttgcccatgacgccgccgtcaaggccagggccagggtggtggttctgctggaggagaagaagctggtggaaggagcccaggccgcccaggaagccaaggaggaagcggaagtgaccgtgcgcaccaaatatgaccatgaggccaataagctgttgaagcgcttcaaggcgcttgccgtgcgcaatccctaccaggccatggctgtgtacgaccgcctgcgtgacggctaccccggctccgccgctttggcggacgcctatccggatgcctccagaatcgccggccagctcaaccgcaagctggaggtcatgatagccgccaaggaaaaagccctggaaaaggaacgtgaaaccttgagaaaggaagaggaaaagcgccgcggagaccccaagctgacgaaagagcagcgccagctcctgatggacgctttccagaaaaggcagaccgccatccgggagcgtgaaaaccagctcacggaagtgcaccgggccttgcgcaagaaggtcaaggagcgcggggaccggtggtttgaacctgcggccggctccctggaagccatgagggacgtcaagctggtggccgctacggatgcggaacgcctgaaaaaccaggacccggaaaacggggctggctccgccgcactggaaaaggcctggaacctgtgtgacgagaagaaatttgacgaggccatggaggccctgacggaagtccgcaccgcccaggttcccagggaatactatgaggaactgacggagacggtgcgcgcgggcctgcaggaacagcgtgcccgcgaacgcgcggaacgtgcggaagcggcgcgcaaggcccgtgaagaccgggataagaagcgccaggaggaacgggctgccgctgccaaggccaggaaaaaataatccggctgtttcccggagaaaagaccctccggggagcgccgcagaaatggccttcatggacaggatggatcaagtaaagctggacccattctgtttgtcgggcctgtttagtccatttaccccgtgttgtttaatataaaagcctcctggaattcttctgatggagggggctccggtggcatggccctattactgggccatgcggttttttgcgcggaaaagcgggcaaatcttaccccatgcggtatttcctgctttcttccgccgcggcttcggtatagaagagtcacatgaggaacgcttcttgcaaacgggtcaccggtgaaacggacatcagcatggaactgaacctggacggcaccgggtgcgccgccgtcgccacgggccatgcgttttttgaccacatgctggatttgctggctcgccattccctgatggacctgaccctccaggcccgcggcgacctggaggtggacgcccaccacacggtggaggacgtaggaatagttctgggggaatgcatcaagaacgccctgggggacaagaagggaattgcgcgctacggctgttcctacctgcccatggatgaaacccttacgcgcgtggtgatggacctgagcaaccgcccgtatgtggtcttccgcattccggaagggggccttccggacgcgcccaactttccgctgaccctgtgcgaggaattctgccgcgccctggccaacaacctgcgctgcaacctgcatgtggaagtgctctacggcagggacggccaccatattgcggaatccgtcttcaagggcatcgcccatgcgctgcggcaggccgcggccattgacccgcgtgccgccgggacgctgccttcaaccaagggaatgctgtaagtccatgaagctcggcgtgattgattacggcgcgggcaacctccgcagcgtgctgaacacctttgaggctgccggcgtgactggccatctggtccgcacgccggaggatgcggcaggcgtgacccatctggttcttcccggtgtgggcgccttcggcgactgcgcggaaaagctgcgcagccaggagctggtgccgctgatccggacgtggatagggcaggacaagccttttctgggcatctgcgtgggctaccaggttctctttgaaaccggggaggaagacgaacaggtgcccggactgggcatcttcaagggccgcgtggtccgttttgcggaatcggaactcaaggtgccccacatgggatggaacagcctgactctttccaatcccgccgatcccatctggaaaggcatggggccggagccgtacttctactttgtgcactcctattatccgcagccggaggatgaatccctagcggccgccttctgcacctacggcgtgcgttttgccgccgccatcaggcgcggcaacctggtcgccacgcagttccacccggaaaaaagccagaaactgggcgtgaagctgctggaaaacttcgtttccctgtagcccgcaaatcacggaaccgggacgggaggacccttttcctggaggacggggcaggggaggattgcattctcccgcctttgcgttattttggggatagtgatgacaaattgaatgaaccgtatgcgcggaatgcggtcttataaaaagacacccatgaataaatcattcaggttaacaggagggattctcgcatgcgcgtgcatgctgggcggccttcccgcacatgcaaataacatccccaccaaaatgtccgctcaagaatctgcaaccatccagctcccggctcagggccgcggaaattccagggtagagtaccttgggcagtccatggaccagttgatttacgacttcatgcaggaggaaaaaattcccggcatgacccttgcgattgtccaggccccctacattccccgcgtggtaggatacggcttgtccaatgcggaaacgggcctgctgtcttccaccaataccttgtggcctgcggcggaaatctcccagggatatgccgccattgccgccttccagctcgtggaaaagggcaaaatggacatccatgacaaggtgtcccgctatgtggccggcctgccggaagcctggcagaatgtctccgtgctccagcttcttcagcattcctccggcattccggactacaggaaatccccccagttcgatataggccgggattatgatccggcggaactcctttccctggtcaggctgaacgatttggaattcccctccggaacggacgtgcgccagagcgccacgaacttcctgcttctgtccatggtcattgatgcggtggcgggcatgccttatgaggaattcgtccgggaaaaccagttccagccgctgggcctccagcacaccatgttcgggaaggatctgggagccgtgcagcaggacaacgtgcgcgaacacggcaacaggcattccctgttcaaatcccgtgtggaatatgtggacccggcggaaacggcggcgggctatgcggtaaaggacggcgccgttaaatccgttccgccgcccgcgcgctcctccctgcgcggtttttcggacatctggtccacgccgcaggaaatcagcttctgggacatttgcctggcgggctccatcctggtgaaggatgaaaagcaccgggacatgatttacaagcccatccggctggacaacgggaaaatcgttccggccatggccggctggcagttccctcaccacaagggcctgatggatattaaaggcggcgttcccggcttctcctcctacatctgccggttcacggatccgtccgaactcgtgtgcgtgacgctgacggcgaacaaggagggcgtggacctgaccaatctggcgcgccgcatcgccggggcgctggatcccaagctgggctccggccatctggacgacgattccctgtatctttatgaaagcgtcttcggcgtggacgaaaccatggagcgcattgaaaaaattctggcggaaaaatccattcccgtctttgccaggattgaccacggtaagaacgcccgtgaagccggactggaaatgcccccctccaaggtcgtcatcttcggctctcccaaggtaggcaccaacctgatgctggaaaacccgggcattgccacggaactgcccctgcgcattgccgtatgggaggataaggagggcagcacctggatcagctttccccacatggaaaaaattgccagggcatacggcgtggaaaatctgcctcctgttgcccccatccgccagctgctgaggaacattgtctccagggcggcaaacgtttactgaacaaggcttccctgcttccgtgcacggaaggaactggccataagaaaagaaccgcctctttagggaggcggttctttttgataaaaggcaaggagcggatgcttcgtccgcatgggccggctttagccgagcaccttgtagtactgaaggtgaatctggggattcaggcgaaggcgttcgcggatggtcttgatggcggaaggttccgcagagaacgtgtaggtcacgtactggccggcggaaaggtggttggattcgtaagcgaattcgcggcggccggtgttttccgtggcggtgatgtcggcgccttcttccttcatcgtggcggctacggtattgatcaactcctcaacgggggtttccgtacccttcatgttgaatacgataagagcttcgtaatttctcatggtcttgtgataattagaaatgtgtcgtgcgaacggtgcgcaccttgcgggcaagtaaggtgcaatgattgtcttcagaaagcaagcctattttttaccttgtttccgggaagatgccgtttcctgcattttattcccgccggggaaggaaagaatggggaacgccgcaacggaagagattgacttttcccgtacggttgccaatcatccgttcatggtgaaattgttctgcatggcgcttcttgccggattcctctgctgcgggagcgcccgttccggcgtccggatggtggatgtggtgggggatgaaacgtttaccagggctctggagacgattggcagccaggtgaaggattcctcctcctgcaaaaaagtggtcaaggaattgaaccgggaggctgaccggatggaaaaggcgtggcgggaggcgttcatgtccggaccccctaccacgcaggagtggtgccgtgtggctgacgtggatgtgcagttgttcagaaaaatggcggaaagcaggaaacgggaaaaaaaggaggagatagtttccttatcggaattggaggatgacggcgtcattacccatgaggaggcggaagagggattttctgcgctgcgcaggatgatgtgggcgtccaagacggcgatagactccctggataatttcatcgcgcaggcggaactgcctttgccgtcatccccggagggagactcctatgaaaagctgctggcctggaagttgaatcctgaatcttccctgtcttataagatagatcacgacccgctggtcaacggcagtctggaagaaacgctgcaacggtgctggagtggcgaagttctggggttgttgacggatacggttccccggatttcccgtgagaggcgttttttgttaatccggtgttatgcagaccggcaggtggagatggcggaaaggttttccaggcttccggccctgacgcctgaacaatggtgctggttccaaaagagggagcatgacagggaagccttggaacgttccgccgcagatctgttaacgattgctctgcttttgtggaataaaggagaaagggaggaaagtgatcccctgatggaagaaaccttccggtattgggtttcagcctcggaacgggtggcagaggtgtggcggaaaaaactccggaaagaagaggggcgttaacgcgtctgcgccatccttacggccagctggaaggcgtggatggtgctggacggattggcctttccggcgcccgccaggttgaaggcggttccgtggtccgggctcagccgggggcggggaaggcccagcgtgacattcacggcggtatggaagtccaccagttttagcggaatcagcccctggtcatggtatggggccagcacggcgtcatagttcccttccacggcgtcccggtacacgcagtccggaacggacggaccgtcaaattccgcgtccggatgaatggcccccagccgttctacggccggggcaataatagttccgtcctcgtcgccgaaggcgccgtgttccccggcatgggggttcagggccgccagggcgatgcgcgggcggaggattcccttgcggaggcagaaatttttcaacagggttccgatgcggaccagttcctccgtgttcagcagggacggcacgctttgaagggacgtgtggatggtggccaggcccaccgtcagccgttttccggtcaggcacatggcgtaattgcccgtatccaggcgttccgcgaagaattccgtctgtcccggccagcggaagcctgcctcgtgcagggtttccttgcagacgggcgcggtgacgacggcgtcaaccgttccttcccgcagggcatgggccgcctgttccagatggtcaaaggcgtgcttggcggattccgcattcggcctgccgaggcggacctgcaccctcttgccgatgaggcggtattccgccccttccgggagctctccggaggcaagagctgcggagatgacttccgggcctatgcctgactggtcgcccagcgtgtatccgataaccggtttcatggtgtggaaagtggcgcccttacaattccgtggcttccggtatccccgtggcgggagccggaacttcttccgcagggggggcagcgggagcaggggcttctgccgccgggcccgcctggagggcggcagcccgcttctccatgttgatgacctgcgtggttttttccggttcgtcagggttgcggagttcgaactccaggtgggagttggtggaccagtggtagtaaatggtggcgccaagggcggccagcaccagaatgaggagaatggaaccgaagaaggagcgcatgccgttactgtgtcctgacggaaaggggaattcaagaaattatcaagaccgcctgcatgggctggaaacgccgtaaacggccacgtaaaactccgccgctgcgcacgcccatttccggaaggggcggcggcgcagaaagaaggcgcccagaagcagagcggcgactgcgccggcgcatgccggcccaatcccggcgcgtggggcagctgtaaaaggagggaagacgaaggcggcgtggaaagattcaggacagtattttaaccgcaaggaacagaataatgagcaggatcacgaagccgataatcctgcccgccacgctgccgccttccccgtgctggccgcacatggggcaatgctccgtgccgttcacgccgccgcactccatgccgcacgcgccgcaggcggaatcttcctccccttcctgcgcgtggtcttcaaagaggatttccagctcgcgcacggagggctccacgccggaaacgacgatctccccgtcaatggcgagggcgggaagcagagcgccgacctgctccggcgcggcttccgtttcccgcatctccggtttcatgcccagacggtccagcgcctggcgggcgttggagcgcagggcgtttcccggaaagtcccggttgtaaaaaaattgaatgctggtcatggcgttggggatgtccggactgcttccgtttgcgggaaacggcttcctccaacaaataggataggagccgaaaggtcaatgcgtttttccgtgtcatgacatataagtgttgtacggaaaatattttagacttttcaaacgtggggggaacgggcactatcccgccggtcccgccatgaaaaagctatctctattcctcttgaccctggcctgtgtattccagttctccgcccaggcgcaggaacggcccagttacatcgccattgaggccaattccggcaaacttcttttcagttccaacgcggaagcaaaacggcccgtagccagcctctcccaggtagctaccgccatggtgacgctggactgggtggcccgcacgcgcctgccgctggacaccttcatcgccgtgccgcaggaagccttcggcctccgcgccggaaatcccatggacctccagccgggagaccgcctgacgctccgggacgcgctgtattccaccctgctgggctcggacaacgtgtccgccctgaccatcgcctcctttgtgggccgtgacctggtgtcccgccggggcggcggctcacccattgccgccttcgtgacggaaatgaacaacctggctcgttccctgaggatggccaagacgcgcttcaccgctccccacggcctggacgcgggcaactccgtttccacctcctgcgcgctggacatggccctgctgggtgtttacagcatgcagaacccggctttctgctacatcgtttcccaggcgagccgccgcattgaggtgcagtcccagaccaagggcaggacgatgtatgatatttccaacaacaacaagctcatgagctctcccggcgtggacggcatcaaggcgggaacctcccgcgccgccggcccctgcctgctgctcagcgtgacgcgcaacgccatctcccgccgcagcccccagacggggacggaggtgatttacccgcagcgcatgattattgtggtgctcggctctgcgaaccgctatcccctggccaagcagatgatgaccaccggctggcgggtgtgggaaaactggcaggcttccggcatggacatgaaggatcccaaggagtttgtccagcttcccgtgaaatctggtacagaaaagagataggaagtagacggccccggaattttctgctataagaggcaccgaatatgaacatcggtgttttgaatagcgggggtgactctcccgggttgaatgcagtcattgaaggtgtggtaggcgcggcttcccgccgcggctggaacgttgtcggtttttacgacggttttgaagggcttctgtccgaggaaggcaatgaacggtttgaatggctgactcctgtctgctgccgcggcttgcgcgccaagggcggcaccatcctgggaaccgtgaacaaggggaacttcgccatcaaggtaggcgtggaccagaagggggcgattgaacccgccgtgctggaaaagaccaaggccaccatccggcggctgggcctggacgccctgatcgtcgtgggcggagacggctcccagtccacagctctgctgctttctgaaataggccttcccgtggtaggggtgcccaagaccattgacaacgacctgggcgcgaccgatgtcaccttcggcttctacagcgccgtttccatcgtctccgaatccctggaccgcctggaaaccaccgcaaacgcgcaccagcgcatgatggtggtggaagtgatggggcggcatgcggggtggattgccctggaaggcggcatcgccggaagcgcggatgtgatcctgctgccggaaattcccttctccattgaaaatgtggtgaaatgcatcaaggaccgcaaggcggccgggcagcgggaaatcctggtagtggtctctgaaggcgcccgcctggcggacgaactggtgctgctggatgaaaagacccagggggaagtgcgcctgggaggcatcggcaaggtgatctccaagaaactggaggaagccacgggaattgaaacgcgttcctgcgtgctgggccatatccagcgcggcggttccccctgcgcctatgaccgtattctgggcgtgcggttcggcagttacgccgtggagctggtggaaaagcgcaagttcagctgcatggttgccctccggggaacgcagatgactgccgtgcccattgaggaagccgtgaaaaccctgaagctggtggaccccgactgccagctggtgcgcacggcgcgcgacctgggcgtatgcttcggggactgacgttcctccatttgcaggcgaacaatgcggcctcctgcggcgttgactgtttttcaaccgtatcctggaatcaggatacggttattttttgcggaagcacgccatattcattggggccgggagagcttttaagcagcatcatggacaggaagaggatggaaaacaggtccatcaggctggaggccatccccagatagcccaggtagggcgtcatgtcctccggaatcaggcgcagcaggaaaatcagcaggaaggtaacgatgaaaatgaggatgggaatcaggatgaattttccgctcaggctgctgtcatgcaggcggcgcacggccaccggcaggttgaacaggatgttgagccccgccacagccgccagaagctccagggaaagcatgctcagctctccggcctggtagaaaaagtaaaaggtggggttaaagcaggcgtgcgccagcaggatcagggtatcctgcgggtgggcggcgtacagcaggatttggcgggatggggagacgtaaaagcccagcgggttgctgtccacgtctatcatgctgtagcccagcggcaggaacaggaggacggaaaggaggaagaaggaccagaattccgcccgtgaggcgcgcccggccaccgtggtcagcttccgcaggctgatgagccagtaaaggtaaaacggcgtgaaaggcggctttttccgttctccgggagtaacggaggcgtttgccggctgtgcgcccgcgcggcggcagtacttgttgccgtccgtcttgctttctcccagcgtcaggtagaaaaagatcaggtgccccaggccgaagggaagcagcacggaaagaatccagaggccgctcctgcccgtatcatgcaggcgtctgaatgccgccgccgcgcagggaactatcagggctgcccacaggaggatggtcagggcgtccccgtaaacgctcagccttgtatccggaatgtgcagccagtccgtcaggatgtagcctgccagggccggaatcagggccaggaggggaagagccatgaaccaccagaattccgcccgggaagtgcagccccggaaatccgcataacggcggaagccttttttccagcaggaaaggggggaaggggaggaagatgactgtggagcggcggaaacggcaggggtagcaggggtagcaggggtagcaggggtagcaggggtagcaggggtagcaggggtagcaggggtagcaggggtagcaggggtagcaggggagtccggcatggatgagaagggggtttccgtttagaccccctgacgccgggaaatgctcaatacgcccgcgtccaggacacggaaaatttctttcccgcagcagagccggtcagatcaggacaaccgccatcagcagcatcccggcaatgatgcccatgatggaaatgtggtggtgcccccagcgttccgccatgggcagcagctcgtcaaaggatatgaagaccatgatgcccgccacggaagcgaagaggatggccagcacggtgggggtgaggaagtggaacaggaagagcatggcgatggccgcgcccaccggttccgccaggccggagaggaaggaatagaagagggcctttttacggctgcctgtgccgtagtaaagaggcaccgccacggcaatcccttccggaatgttgtggacggctacggccagggcgatggacgtgcccagcgtcagggagtccagcccggcggcgaaggtggcgaccccttccggaaagttgtggatgccgatggccagcgcgaacaggatgccggaccttttgattttggaggaggaaaattccccgctgccctgcccgtggatgtcttccgggccgcgcgcttcgtgcgggttttcgtcttccggcaccaggtagtcaatcagggccgccacggcaatgcctccgaagaaggaggcaatggcaatccatgcgcctgccgtgtggccttcaaattccatcagccggtgctgcgcctctcccagcagttccaccagggaaatgtacaccatcaccccgccggaaaaccccagggaaaaggtaagcgtctttgtatccgtcctcttcatgaagaaggcgatgaagccccctatgccggtggcgagaccggccagcgtagtgagcaggaagacgacgaggatgtggttggcggaaaggtccatgtgcggacctgccgggcagggagaacccggtacccggcaggaaaaaataggttattttttcgcgggcgccggaggaacgatcattttagtggcccggatggctccggggggaagcgggggctcttcccccggcttcagctggccccgttccttcttgatttcgggcagtttttccagaagcctgctgcacatttttccttcaaagctgtccggaagaagcgcaatggcttctttaagaggccgttccagttcattcaccctgttttgctgcataagcaggttcacctcttgcatgaggacagcctgtttgacttccggaagcagcccgtccttcttcaggtagctgtccatgatggaaagggcttcgtcaggcttttgctccgccaggatgtggacgtttttctgccggaacgtatcggccaattcctctctctgggtattgagcagctctttcctgttcagtttggcgcggatgccggaagcatcctgcggatccagtttcgccagttcttccagagccggcttatagaaggtgcggatgctggactggggaaccgtgttcagcagctggaccagggcgtcccggcgctcttgctctgtaagctgtcccgccagtttggccgtcagggcctgctgcgttttgagggcttccgccgccttttccgtatcctgcatgacctggtccggattggagtagcctacgacggtatggacggggcgcccctgggcgtccgcaaacaccagcgtggggaatccggtgatgccgtaggatttcttgtaggtttccagagaagcttttgtctgttcgtcctgctgctttttacgcgggtagtccagttccacgggaatgaaggagcgggcgatgtcttcctgcaccttggggagggaaagggcctgctttttctgcatgatgcaggctccgcaccagtcggaaccggtgaattccagcatcacgccctttttccgggcggcggcctgctgcatggcctctgcggggttggtgctccaggcttcggaagctccggcgactccggcaaggagcgcggccacgaggggtaatatgagtgttttcataatatggagatgattgttacatggggggcagcggagaatgggcgggaggaacccacatgttcccggaagaggatccgtccgaatctcccgtgtgtgtgggcgtttcaatttgcggcttcccggcgggcgggtccaggtcctccaccaccactttctttttggggggctgtggagcgggggagggagccggagccggagaaggcgcccggcggatcacgggggcctgaagggaggcgtccgtctggttcatggccgtgatgttcagggggtcgccgtaggccagcatttcccggatgtcgtccgggaggtctccggccggaatggaggtgctcccctgttcgtgcatgatgcgcacgaattcattttccacgcgggtgatttccacgttcaggtaggttttgccggaatgggatgttctgaggatgtcgaacttgcggccgcgggccttggccctggcgtcctggcggtagcgttcaaagtaggagcggatttccccccggatgccggccacgcgcattttctccttctcaatggacttctgcgtctcttccagatcggatgccgtatgttcaaaaatgtccagcaggccgaggagctgttccttgggggcggtcctgttccgtatttccatgagctgtacctgctttttcaggagctgggagtgattggcctccagcgcctcccgcgcgtctttgaccgggtccggaagctgggagaatttttcataaacgatgtagccggccccgatgacgatgagggcgaacagcccaaggcacagattccagaaaagggcgtctcccctggctttccgttcggcgtcttcctgccgggtcgattcttcttccgcggcgtgttcggacacaacgtccagggaggttttcaggcgttttttagccgcaggggcggaggttccgtccttgtgttcttcgccgttctccctgggggcgaagcgggtttcgtcttcggaaggagggagggcctcgtcggacggctgcttgggggaaggtgagtcagtcatgggttgcgtggggtggggttaatctaccgggtgggactgcttgaattcggccagtttggcggcatacgcgttatactggtattgcagggcgtggaactcctgcttgcgctgagccagcgtcttgcgcatgtcttcaatgtcaaagcacaggtgctcgaagtcgcggcgcttggagggcagaatgtcaatatccttcaccgtgaaaggcgtggtgacttttcccggggtggaaagccgtttttgaagattgtagttcacgcgggcgtcgtgggattccgcgcggctgatttcctggtctatctgggccagggcgtccttcgcctgctggagctgggcctggagctgctggtgttccgaggaggaatttcccgtaataaaggaggtaagggcttcattcgtaccgctgtcgcacgaggtgagggccagcgcaagggccagcgccggacaggtacgcctggtgaatcgcacgatattgaacatgccggggattatgaacattaacgggggggaaagtcaaactgttcatgcgccctgcggaacaatgatttttctcgcataaaacgcgcatgcggctacaatgcccgcggcatgatgcaattatcggagattggaggccacctgacggccagaacgggtattgatgatttgatggaggatttgttcaaggccctccattcggaggaaacaggcctgtgccagttgaacggtgggagccccgccgtcattcctgaggtgacggaactctggcgccgcagcatggcggagctggtgcggaatggaaagtttgacgtgctggtgggccattacgcccatccgggcggtgaccccgccttcattcgcgcgctggtccgttttctcaatgaacgctgcggctggaacctggcgccggagaacgtggcgatcacccagggcggccagatggcctgcttcacgctgttcaacatgctcgcggggccttgcccgggcggaggcatgcgtgaaatcctttttccgctgtgcccggattatgtgggctaccagtcccagtccctgtgcgggggcgtgatgttccggggcatccggcccggcatccgcatgctggacggccatacgttcaagtacgtgattgactttgaccgcctggacatacgcccggaaacggccgccgtctgcatgtcccgccctacgaaccccaccggcaacgtggtgacggatgaggagctggaccgcctgcgggagatggcgtcccgcgccggggtgcccctgatgattgacaacgcctacggaccgccgctgcccaacatctgctttgtgcccgtgaagccggcctgggatgaaaacatgatcctgaccatgagcctttccaaaatcggtctgcccggcacgcgcaccggcatcgtgattgcgcgcccggacgtcatccgggccgtggtcagcatggtgaccacctcctccctgtgcccgaacaacctgggccaggcgctggtaacgccctatctggaagacggcacgctggagcgcgtctgccgtgaaaccctcacgccgttttaccgcggacaggcggaattcgccctgtccctgctgccggaactcttcggagaatccatcccgtggcgcgtccacaagagtgaaggcgccatgttcctgtggctgtggttcgaggggcttcccatcacgtgccaggaactctacgaacggtgcaaggcccggggatgttttgtgaatcccggccaccacttcttcttcgcccttccggaggagggggaaccctggccgcaccggcatgaatgcatccgcatcagcttcacccagacggaggaactcctgcgcaaggggctttccatcgtggcggacgaggtgaagaaggcctactcccattcttaacctaaatctgacccgtaaccatgaacagcatgaccggcttcggcagagccgttgcccagacagaccgttacaacatccttgttgaaatatcaggcgtaaaccgcaaacagacggaaattgccgtcaacgtgccgcgcagctatgcggaatgggacgcccccgtgcgctccatcgtccagggggccgtatcacgcggccgcgtgggcgtctccgtctccgtggaacggctggcggaagcggacggctccctccagcttgatgaaaacaagctggcctccctcgcggggctgctgaaccgcgcggctgacctggccgggcagcccatgcccctccaggcgtccgacttgctgcggctggaaatcatcgcttccacggcggaagccgccctttctccggaggaggcttggccggtggtggaagaggcgctcaaggccgccctgaaagattttaccgccatgcgcgcggcggaaggagccaatctgaaagcggacgtgctgggcaagctggatacgctggaacaattccgcctcagcatcgcggagcacgccccttccgtgcccgtcaggctgcgggaagccatgctcaagcgtctggcggaggccgacctgtccgtttctgcggacgatgaacgcatcatccgggaagtggccctgtttgcggacaagtgcgacatttccgaggaaatcacccgcctttcctcccattttgaccagttccgcaccttgtgcggttcgtccgcgcccgcgggcaggcccctggacttcctctgccaggaaatcttccgggaattcaacaccatcggcgccaaggcgaacgactccacgctggcccatctggtggtggcggccaagacggagctggaaaaaatcagggaacaggttcagaacatcgaataacagccatgaaacagccattgggaactttgctggtggtgtccgggccttccggttccgggaaaacgaccttgtgccgccgcgcgacggaaaacgggctgtgcgtgtacagcatctcctgcacgacgcgccgtcccaggtccggggaagttgacggggtggactaccacttcctgactgccgccgaattcgccgccagggtggagcggggggactttctggaatatgcggaggtgcacggcaaccgttacggcacgctgaaggcggacatcctgaatcttctggaacaggggaaaaacgtggtgatggacatagacgtgcagggggcggagcagatccgcgcctgcgtggacggcattcttcccaaatgctatacggacgtctacatctacgtgcctcaggaagagctgagaaaccgcctttgcggccgccagacggatgaagacgaggtgatctccctgcgcctgcgcaatgccgcgcgggaggacgcctgcctgccccggtaccagtattgcctggtttcctcagaccgggaaacggactacgccgcctttgccgccctgctcaagtgccagtccatgcgcgtggcgctgatgagggagtaggactcccgggtgctggatttttaaggggctgtctttctttttacaggagagacagccccaaataatgaaatgggtccacatctgaatcaccacggaaggtaaaatgtaccgtgggatcaggctccggattccggatttgccggaccagctcaacattgatagatacttctcactgagaatgttcaagagtgggattgtattggaaggccatgtcaaaaaacctaactcaaccattgttgatgatcctcgaaaacctcacaaggagaattattccgtctccttcacttttaaggaggctcccaattcccgtaaacgccctgaatatgacgacgacaaaaacaacgatttttctggtcagccttgcggtatcggtttcgtgactctggtatcagatgacggttgcactatttccattacggacgataagggaaaaaaacaggaatggctgaaagaaagcggcaaaggtcatgatatttccaagggaagaagggattatccccacattttgatgcccggcacccatacgtttgacattgaatattcccagacctattacaatccggctccggggaaaaaagatctagacggaattacccttttcgtcactcctgttgtggtggacatttccgtgcggaagcaaaatgcgcctacggagaacagtagagtattgctgattaagggagaatgcatagaaatggcgttgaataaggatatgctgggacaaaaaagcaaatttaaagatattatcacatgggaaatatgccggcttcgagcatcaaagacacttaattttgaaacccaatgggttgaagttggaaatggaacaacatgtacctaccagtgcaatactccgggaatttaccgtgtgcgttctaaaatcaatggtaaaatttttacatatactcggcgggaagatgcgtatggtggaaaaaaatctccttttttgtgtaggggagacccggattgcgtaggggtagtcaacagtcagcatgagaaaaaccttattaatagtgccatcgcagatttgatgaaaaagacttatgccaaattgaccccgtggtatgattttgacaaattggaagatgttttccgtaacgcttctcctccattggataccgcaacaaaacagctttatacggaagcggctcttcttaaaaaagaagtaaagaattacgggcataatgcctttggaatgaataatttttataatcagagcaaatgtaatatatttgtattttaccactgccattcctgtggtattgatattcctaccttcaccatcaacctcgtccaatcacgggcccccatagttgcagaatggatatcaccaaatacaacaataaaagggtggaaatggttcaaggcttccactgttttacctgagcctggatggctttgtttcgatgatgcccactgtgctattatagactatgacggtgcaggaattagtggcggagtttctgataacaataaaattctatatttaatattcccgaattattttagaaaacatgaataaactattatcttatttcttgctgagcctgctttcctttccggctttttccaataatcaggagagtccggattattggaaaaaaataaaaattgttcagcaacagaaaagtcaatgcatcaaggagaagcaatggaaggccgcggcaaaggcggatgccgaatgccgtcagcttattcttaagaatattccctttatcttcaatgatctttcccggttttccagggtggagcttacacagatggctgactacatcagaaaatttccggatgaagactatttgcaggcagttcaagaactggccaggcgtgcaaaagccacggatccgcttcatcaaggttttcttgaaaaaatcatttttgatccttttgaaggtcccagggacaattttttcgccctgaattggagagaccggcaaatcagagatatttgtaaggagctggactccaaactatctccgaacagcccctcccggaaacagatcgcggacattctcaacggccagcagttccaggcgatgattgccgagggattggaaggcgcaaccctccgcatgccctcccgattatccagagagggttatgatcccctattccgtgacaaacacgcgggcgcttctgaaaaacagcaacgtcaagtcatcctggaccttcaaaaggcatggaatgccgcgtgcgcccttacgctggccatggatggggaaaaagatatgtccaagacagttgacgcctggaaagccgctattaacgccggtcagaacgtgatgtcccttcagccacccgcctcagagaaggaacagcaggctttgggccaattcttttataaatcagtatttcttcagtacagtaacttgtcacctgtgattcaccagcctgattccctgtatgtgcgggtaagtgaaaagcttgcttcgttaacagaaaagaaggaattcacgcccctgattgagaccattctttcttttttccatacgatggcccagccggattcctacttgaatgaggaggcactttatcttcattcagaacccatgcgtcagaagatacggaaagaacgcctttcctgtgatccggatgaatcctgactttttacacggaagagcggattgcccgccgggaagccttttccgcagaatcgtcttttctacttgagcgggtacagccagccgacggtgcaggtgaagatgatccacagaagaatgttgaggggcagccctactttcacgaagtccttgaatttgtagccgcctgcgttgtacacgtaggtgttggtctggtagccgatgggggtggagaagctggcgctggcgccgaacatgacggccaggatgaaggggatggggttggcgtcgaattgcagggccatttcataggccagcggtcccatgacggcggctacggcattgttggaaatcatttccgtcaggatggagcagatcaggtagaggccggagatggcgaccaggcagcccatggggcctatgttgtccaccacgccgaaggcgatggccttggctaatccggtcttgctcatggcttcccccacgcacagcatgcccagaatcaggaagatgatgccccagtccaccgcctggtaggcttccttcggcttgacgcagccggagatgacgacgatcagggcgccgatgaacgcgaggtagaaggggttgaagcgcgcgaagaacttgaagaattccccgtactgctcaaaggagcccagcagcccgatgaagatgaacagccccatggccaggatggcccagccctgcttgctgcggttgtgcgcgtccgcggggcgctggctcaggggaatgatgcgctgcttggtcaggatgcggttcatcccttcctgcgggccttccagcagcagggtgtccccggcggccagcttggtatccggccccatgtccgtgatgttcttgccctgcctgtggatggcgagcacaaaaatgttgaaccgctggcgcagcttgagttcggacagggacagtccggcgaattcggaattgttggcaatcatgccttccacgatttgcacgtcgcgctgttccagcgtttccagtccgcggctgtcgtcccagcccaggtccacgcccctggcctcccggacctggttgacttttctggcattgcacaggaagaggatgcggtcgccctcctccaggttgatgtgttgcagttcctcctgcatggagaagcccttgcggcgcacttccacgattttggtgcccagcagttcggactgcatgaggctgacgggagtggcgccgatgtgcggggagtccgcggggattctgacctggagcaggaagtcgcgctggatgccgccggggagcatggtggacagggtggggcgggacgggagccatttgcggccaaaggtccagagatagagcagccccgccgccgcgtaaatgagccccatgggcgttaccgtgaacatctggatgccttcatagcccagtttctgcacctggcccagcacgaccacgttggtggaggtgcccaccacggagcaggtgccgcccaggatggtggcgtaggagaggggaatgaggagtttggaggccgcgatgttgtggtcccggcagaaggccagcacaatgggcatcaggatgacgaccaccggggtgttgttgacgaagggggagaccatgaacgcccccagcgtgatgaccagcagcgcggtcagctcccggcctttggctaccttgttgaaaagcttggagaggtccccgatcagccccgtcctttccagggaggcgctcaggatgaacatgcagaccaccgtcagcgggccgctgttggcaaagctggacagcacgtcccgcgtgctcagtatccccgtgagcatgagtacggcggttcctgccagggccgtgatttccacgggcatccattccttgatgaagcagatgaacaggagtagcagcaggatgcccacaatccattgctgggtggccgctgattccagccagcccatgacggaggcggagttgatgttgagaagagaaagcatgtactgaaagttgaaggtgcagggaaagggaccaactctcctactttcccggcctctttctgtcaagccgcaataattttccggaaagggtttgaaaaggcggctgcgcttttttatggtggcggcgccgcatggattcccccatagtaacaaggttcgcccccagccctacgggccgtctccatctggggcatgccctggccgcgtgggaggcccgttccctggcggaccgtttttccggaaggtgcgtgctgaggatggaagacatcgaccggacgcggtgccgtccggagtttgtagggggcatcctggaagacctggactggctgggcattcgctttgacgggccgatgatggtccagtcttcacgcttcagcgcttatgaacatgccctccaggcgttgaaggaccgcggggtgctgtacccctgtttctgcacgcgccgggagattgcggaggaggtggccgccatgggcggcgcgccgcagggcggccgcgtggacgtttatccgggaacctgccgcctgcttgacaaggggcgccggaaggagcttctcaaatccggcaagcccttttcgtggcggctggactgccacgccgcggcgcggattacgggccccctgctgtggcgggacatgcggtccggagaccaggtctgccgcccggaggaactgggggacgtgattctgggccgcaaggattgtgcggccagctaccatattgccgtggtggtggatgatgcggcccagggcgtcacccatgtgagccgtggtgaggatttgttccctgtgaccggcattcaccggacgctccaggccctgctggggcttccagtgccgcagtggtaccatcaccggctggtgaaggacgcctccggcaagcggcttgccaagagggaccggagcctgagccttcaggagatgcgtgccgcggggatgcgtccggaagacgtgttccgcctgatgcgggagagttaggggatgttcattcccgtatttccggagtatcttcttggcgtcttcggcggcttccgtcaggaaggccgggttcgggagtccggttgcgttttttccgcggtggggcggcttccgcgttttccgatgcagagaaggcatgcccaggccgccgccatggttagcagaagaagggcacagaaggtcaccagcagattcaggtgacccagcgggataatccatgcgggcggcatgattgccgttcccgccagtacctggggaagccagttgagggcagcctgggaaagctgggtgataagcgtgaaggccagcccagcggccagcgtgagacgcaccgccggaagaaccgggcggaaggtttcacggacgttttttttcatggcccatgccgttccggcgaacaggaccgcaaggagcaggggggccagcagcgctgcggaaggaatgctgttccagtagttccacgcacagaggggggagacggccaccaggaggccggcgattttaatcaggaggccccggtgtggcggggcgggtgccgcagcgtggttcatttccgttaatcgggccagacgttgccgggcgtgctgccctgggtgatgacgacttcctggcctattttcagggtgaagttgggcgttacttcctgctggacttccacgagttcgttcgtgtccttgagcttgacgcgcacgcggatcattttggtggcctccaccctgccgtccacgatggagccggtggcggaagccagtttggaggtgcccatgccgatgatgccgggcgtcatcgcttccgccgccgtgcccgccatgttggcgaaggtgccgtcatccgcggaggtcagcacgttgatttccttgatgcggaccacgttgcccagcttgatggtcgtcaccttcccggtggcgatttccagagtgcttttttgagtgcaggagaagaaggtggggagaatgagaaaaacgggaatgaatttaagcagattcatgatacacgtatgttactacgttgggaaaaggaggcgtttttcagtgtgcgggcagaattgtgtacgtggccaggtacagcagcagatggagggaggcgagggccagcaccttgttcatgcgtttgtccgcaggcgttttgcggatcaggagcatcaggtagccgccgaagaggatggcgggaatccacatccaccacgtatgggagaggttcaggtgcagggcccggctggacgtgggcagcgtgatgtaggccgccaggatgaaggcctgggccatggcgcgcgcttttccctcccccagccgcacggccagcgtgcgcttgcccgtggtgaggtcttcctttctgtcgcggatgttgttgacggctatcatgacggcgcacagaaggccgcactgaatgcccaccacgatgccggcgttgtacaccgccagggattccaccagcgtgccggggacgaccggagccgtgcctatctgcaccaggatggttcccaggacggccaccaggccgaagaagaggatgacgaatatttcccccagacccttgtaggccagcggccatggtccccccgtgtagccgtaggtgaagtagagggacggaatgccgatggcgatgatgggccagccgcgcagctcaatgagggggagcgccagcaggcacgcgcccagcaggaaggcgaggccgatgatcatgaccgttccgtgggagagcgctccgctggccgtcatgcgcacggggccggtgcgccgttccgtatcggcgtgcttggcgtggtcaatggcgtcattgaaaaaattgcaggcaatctggaggcagaggcaggaggcaagcgtcaggagggccagggccgcgttccagtttccggtcagtttctgcaccaccatgcagcctgcccataccggaatgagggaggcggtgagtgttttggggcgtgccgccagaaaggcggaagtaatgatgttcatgagagagcggaaagaaaggctccggaatcagcggagaatagggccgaggtggcggagggtttccttgatgagggagacgtgccactggccgggcgccgtctctttttcccccaggtagccgtacaccaggcaggagccgagctgggagtaaagcaggcgggagacgggccccatgggtcccatgcccatgacggcaatcggccccttgggtttggtgaaaagctgcacgcccgtctggatgtccgaggcgaggcacggggtgaacgcgaatttgacgatgtccgccttgtgggcgcgcgcccgtttttccagttcgcgcaggtagtccacgcccggcgtgatttggaagtcatgggtggagccgatgacgatgacatcccgtgctcccgcttccatgattagttccctggcatgccgcatggccttgatttcaatgtccatggcggtggcgtacggcatgtaggcacggatcagggcaaagcgctcctcttccggaatgcggcgcaggccgccttcttcatggcagcgtacagtgaccagcaggggcatctccggcctgaactccatgacctgctccgtcgtgagttccgggggaagggcatccacgcgcagttccacccagtcgcactggtctgttaaatcttttcctttcagcgttttccacaactcccatgaggtgacggacgcaacgattttcggcggataggtctgatgttcacgtacaatctgctgcatacatcctactattccagtaaagaaaggaaggtcaatcttctattgaggtgttcctcctcattttgcgtccgtattatgtcagttccccagccttgttccttccggagctgtttgccttaatcctgtgccaatcctattgtgcggctcccctgcgaatggcttgcggggcgccaacgccggcagccattcagctatccggacaagattgtttcataaggttccgttttcttttccggcggagggcgttatttttcaatctccagatgttaagaacatattgagaagggagggcaggcttgaaaaaggcggcctgacggcgttacgtaaaaatctgtgaatatgttttggtcagcgttactgcgaatggggcggaatcctttctgggcggctttggatgtcgtgctggtggtaaagacggaggaaggggcgtccggccatccggaatggtcctggaaagcgtatgttccgcatggcgttccggttcatgaactggttcccgtagacgttccttctccgggaggggaccgggatggggcctctctccgggcggagaggcggaaagcggcccgggtgctggggcaccaggcggctttggctcttgcttcttcccgtaatttcacccgtttcatggtcgtggaggaaaattgccgtttcaggctcccggtaacgggcaccatggcgcggatgcttgggcagttgctgaatggatgccgggaaagaacagccttgtttttaagtgaaccgcatctttctccccatattgcctgctccgtggcgaatggggaaaagtccgctctattgcgcgtatcggatatggctgcctccggagcgtatgtgatgaacctttctttatgtgaccgtgttcttccggcgcttccatctggtcagcgggtctggccatggctgaggtattatggttccctggaagaatggtttgcccggtatttgggccgctacggggatttatatgccctttccccggcgcctgtttcctgcggggtgggagcgcccatgcccgccctctgcaaatccatgggacacttcaataacgcacgtaccaaatatacggatctgtcctatctggtaaatccggcgatcaactcatggcgctggctgaaaagcctgaacctttttgccggaaagaaggggcttccgtgaaaccgctggaaagcgccttgtgccggcaacgccatgtttccggttgcggagcggaacgctttcgtcattgggaccgtcgttttccggaaaacaagagccccggaccgcagaacggcccggggcgtctcccttcatggatgaagagagggtgttaatggtgcatgcggcctagttggccccttcgtcgcacaggattttgacgaagccttcttcctggagacgggtggcgccgcaggcgaacttggcgcggatctggagggcttcctccatgtcgtcgcgtacggaaagcttcaccttgaagtcgttccagatgccgaactgcgccttgctcttcacccaggccaggcaggaacgggtgccgtcctccgccttcggaagccgctgggtacggatgaacttgaagcccatgaaggtgtctatcttgccttccaccagggctttcacgttgttgaagtcataactgctgacctccgtttcccgcagcaggctcatgatctgggagctggtcaccgcaatgacgagctggtcgccgaactggggggcatcctggttccatgcctcgttttcctcaaagagctggagggccgcgcgcagcttggctaccgtgaggttgcttgcgcccttggtcccgctgtccacgtggtccacggcgatctgctggctttccttgaacggaacggcggtcatgccgtcttcccccacgtaattcgtgtccaggaaggcggagatcatcacgtcgtccatgcggcgccctgcggcggcctggagtccttcaatcgtcttgctgacgggaaggtccatgtcgcccaggcgggtagcgtcgaattcgtcgtagccgatggccttggtgaaggtgcgcggacgcatggaacggcgcgtggtgggcgcctcgttcagaacggtctggcccacgcgggtggttttttccgtgaaatccagaacgccgaattggtccagaaagaccaccttgccgctcaagtcgcgcatgacgctgacgtacttgtccaggcgggaagcgtgctgctggagcagggtgccccatttcctggtgtattttacctgataattgtcgctgattgttactgccatgattgcaaatgtaatgatgtttgaatgcgggaacggcaacttggattatcgggtccggaataaccggaacggtcctgccgcggtgggatgcggccatgtcccttgcgggattgcgggccggtcccgtccagcgccaacgggtatgggccacctgcaaaaaaaacgcaccacggcgaaaccgtgatgcgctgggtaaaaggaatgaaaggcgctgcctttccgctgttaaagaatgatcgggtgcgggcgggtggcgtggtccgggccgaagagggccagcatgcggcccgtctgccccttctccacgcggtaggagtagaagcgcttggtatccgccgccgtgtccagtcctgaatcgtgaatctggtcttccggcaccccttcctcaacgagctgggccttgatggccgtggggatgtcttcctcataatgggggggacggatgcagggggagatgacggcaatcaggttggcagggtccacccccaggtatttcttcatggacttgatggtgttggaaacgatgttgccggcggttccagccttgcctgagtgaatcagggagcggtggcagttttccttgtcgtacagccagacggcggcgcagtccgccacgtaaatggcaagcacgcagtcggaaactccggagcagatcaggctgtccacgccttccacgggatagttggagccgatgtcccccaccagggccaccctggtgccgtgcacctgttcggcgcggcgcaggtccttccaccgccagcccagggcctccacttccgccttgtggtacggttccagccgttccagcacggtttcgcggtctccggttacgtccacccccgggattctttcaataaactggacgatttccccaggataggactggatgggcttcaagaatgcaggcgtttccataattgatggatcaatagatgtcgttgggcacatcttgtcgttttgtattacctagtcgagcaaaatctagcgcaaaatgtcacggacgccgcccggtgactgagaaaaggtttttttccgcgtttccggagtgatatgagcaattcatgctgcgcagatattctttgctttccacttttttcgcggggatggccgccatggtcctttccctggctccttcattttcccaggccgtaccggatgccgggcaactgctgaaaagggttcgccagggggcgaccctccaggagaacaaggacatcaaggggcaaatacgcaaacgcagcgtgaaagttcccttttccatgagcttgcgcggcaacctcattgccttccagtaccagttgaataacgtctggaacaggtttgacctgaaattcaaggaccgcggccaggaaatcctttcctggaaggacgggaaagcaggcgttctgccggtcgcccagtacgcggtgcccatcgcggggacggacgtgacgtatgaggacctctccatgcgctacctgtactggccccaggccaaaatcgtccgggacgacgcggcgagcacggtgaagggccgggactgctggattgtccagattccgaacccgaaccccaaggtcgggcaatatgcctgggtgcgcgtctggattgacaaggaaaacggagccatgtggcaggtggacggcattgacggccgcggggaactggctaaaaggttcatgattgattccgtgatgaagctgaaggacggctcctggtttttcaaacggatgaaggtggaggttcgggacccctccaatccccgcagaacggtatctgtcagctatatcgacatggacagtccggaataatcccccgcctcgttcccgcgggcgcccttcccagggaggggaagcctccttctttttcatgccgcacggatggatgatttaggacgtgacaagaaggcgggatgggcgtacatcctccaaaaacctgttatgaagaaacgtttattccttgcatgtgccctggcgctcgggctgtccgcctgttcccagcatcaggagcagccggtggagtccggcgctccggtgaagacctccctttctcccgtgaccgctccggggaagaagccggaccgccccgccgtgaagctgccccccaagtccgtgcaggtgccgtccgtgagcccgtcctacaacaacaccccactttccccccgcattccgggagtgacggtcagccgcgtggccgtgccggacaaagtggtggccctcacctttgacgacggtccccacgggacgctgacccccagggtgctggacatcctgcgggacaacaatgtcaagggaaccttcttcatgcagggctgcaacgtgaaagcccatccccaggtagtgcgccgcatggtcagtgaaggccatgaagtgggcaaccatacgtggaaccacgcctacctgagcaaggtatcccgcgaaaaggcggaatcccagctccagagcaccaatgaagccatccgcaacgcctgcggcattgttcccgtggtcatgcgcccccccggaggctacacgaacgccggcgtagcttcctgggcccgccagcgcttcggcttcaccaccatcatgtgggacgtggacacgaatgactggcgcaagcccggctcctccgtggtggccgcccgcgccgtaaacggcgccaagcccggctccatcatcctggtgcatgacatccacgcctccacggtggcggctgtagacgccattgtgaaagggctgaaaaaccgcggttatgagctggtgaccgtttccgagctcatccggcgcggacgcgccgccgccggccatgctccttccatgcccgcttctcccgccgttccggattcctcccccctttccgcgcccgtgatcgtcactcccgtggcgcccgcccccgttcccgttgaaacggtggcaggcatgtaatctccggcgtttccccttttccattcttctttcaacccggtttccgcagggaaaccgggtttttcatgcccgcggcggagctcgttttccggaggtccgcagggggtggcttcctcttaacgggtacacgcacagaaggcttgacctgctggcgaatttctccacaatcccttgccgtattactcacacccaatccggattgaaatgtctatgaatctcctggcatctgccgacactctccccgcggctggcggaatgtccgctcctctcgcgtttatttacgatctcttcaacaaccctctcttcattttcattggcggtctggtattgctgggtgtgtttttctggtacctgggttccgaccaggacaaggtcaagcgcaacgccggcacgatcttcatcatcggcattgcgtccttttccctgttctcccttttccagcagggcttgaaatacggcattgacattgccgggggcgtctccttcacgctgagcgtagaaccgaacatcggggatgacggcaagcccattccgctgacggaccaggccatggagcaggcgtgcgtgatcctgacggaacggctcaacagcaccggagccaatgacgtcatcatccgcccgaagaaaaaggacaacctgaacctcattgaagtgcagattcccgccgcggaccctgccaagcgcgaggaaaccaaggccatcctgaccaaggtggccaagctgcagattctccccgtccatccgcgcaacaatgaactggtggcggaaggccgcatccgcgttcccggctacaggatgtatgaatacaccttcaagaacggcaaaaacgaggacgtcacggaaaaaatcttcctggaaaaacgtgaatccctgacgggcaaggacatcgtgcgcgccggggtggacctggcccgtcccggccatgtcaacgtcaccctgagcaacgagggggcggacaagatgtacaacctgacttcccgcatgcagctgggccacgaccgcatggccattgttctggatgacgtggtcaagagcgcgcctacggttcaggccattctttcaaaaagctttgaaatcagcggactggatgcgcccggcgaggcggaggccctgacgaaggtgctttccaaccccctcaccaacaagctcaactttgaatccgccagcgaaatctccgcctccctgggtcatacggctctccttcagggggaatacgcgggcatcacggggctgattctctgcttcatcatgatgatcatctactaccgctttgccggtctggtggctatcatgggcctgacgatcaatgccctgcttcttctgggggccatgtccatcttcgggtttgagctgacgctgccgggtattgccggtatcgtgctgaccctgggcgtggcggtggacgcgaacgtgctgatttacgaacgcctgagggaagaaaaggaaatggggcgccccttccgcgtggctatccgcaactcctttgacaaggctttctccgccatctttgactccaacatcacctccctcattaccgccgtcatcctgtactggatggccaccggcaccatcaagggctttgccgttacgctgacggtgggcgtcatcacctccatgatcggggcgattctcgtcacccgcgtcctgttctactgggcggataccatcggcatgatgaaggaccttaaattcctgaatctcttcaagaagaagagcaacatcaacttcatgggccagaaggtctggtcctgctccctgtccgccattctgctgcttatctgcatcgtggtgggggccatgaagggcaaggactgcctgggcatggactttacgggcggttcctccatctcctacctggtcaacaagggagacatctccttccgggaagtggaaggtgtcgtgaacaagctggccctgacccagaaagccactgtgcaggaagtggcggaatccacggacagcagcaaggtgaacatcctgatcaacttctccgacaacgccctggacaaggcggccatcaccacggccctggacaaggcgttccccgtgctggacaacgcaccattcagcgaggaaaccatcgggcagtccatgggatacgatacgctcatcacttccgcctgggcactcttcttcggcattctgggcatcatggtttacctgacggtgcggtttgaatggaccttcgccatcggcgcggtcatcgccctgacgcatgacgtcctgctggtgctggggctggtgatcatcagcggcactgagctgaacgtcatccacatcggcgcgctgctgacggtggccggctattccatcaatgacaaaatcatcgtgtttgaccgcattcgcgaattcctccgcttctcggacccgaatgaaagcgcgtcccaaatcatgaatgaagccatcaaccagacgctttcccgcaccattctgacctccctttccacactggccgtgctggtgtgcctgtacttcttcggcggcccttccatggaggacttcgcctggacgatttccgcaggtattctgatcggcacgtactcctccattttcatcgcctctccggcggccctcctcttctcccggaagcacggtctgcatgaggaagtcaagcaggccatgaaggccggagcctgaggcgcggcaggaaattgattcgttaactctgaccgggggaggccgcatgcctcccccggtctgtttcttggtggaaggaaggggaagggttaagtaagtccgagagagtttgctaggtaagaggggtaagaggggtaagaggggtaagaggggtaagaggggtaagaggggtaagaggggtaagaggggtaagaggggtaagaggggtaagaggggtaagaggggtaagaggggtaagaggggtaagaggggtaagaggggtaagaggggtaagaggggtaagaggggtaagaggggtaagaggggtaagaggggtaagaggggtaatgatgggaattccctataatccctaaagttccctatgattcctataacccctaattccttttcccttttccctgataagaaaaaccccgcctgccgtaaggcagacggggccgtctctctgtttctgctatgcgtttctgcgggtgaacttattcatcatccccttcttcctggaccggagcgggggggaggggcatgtcgttattgccgcgggctgccttcctggcttccctgcgtgcggaacggcgcgcttccagagccttggaggcgtcagcgttgagctgtgccatttcagcttcattcagcttgccgtccttgtcggcgtcatacttttcctcaatcaggatccagccggccgccatgatgggggcgcggttgggatcaagctgggggcgggggccgtccgggcggttgccgcggggaccgcggtcaccgtctccgcggcgtccttcactgcctctgcgaccttccggtcccctgggcgcgcggggtccttcagccctggggcctccgggacggcgcgggccatccatcttgggcgcacccggtcccttgggaccgccgggcgcggcatgatgcgggccgggctggccgtgatggggagggatagcctgcaattcttccggggaaagcttgccgtcgccgtccttgtcaaacttcttgatcatgttggcagcgtgggcttcctggcgggctttcatttcctccatgcgcttggcggcttccggatggtccttggcccagtcctcccgcatggctttcttttcctcgtcggaaagcttgccgtcgccgtccttgtcatacttcttaagcatttcggccttgcgggcttcctggcgggccttcatttcttccatgcgcttggcggcttccggatggtccttgagccattcttcctgcatggcctttctttcctccttggaaagcttgccgtcgccgtccttgtcgaacttcttcaggatggctgccttcctggcttcctgggctttcttgacgtccgcctggagaacggctatttcctcgtcggaaagcttgccgtccttgtcggtgtcatacttggccatgaccagttcttccccgatgatcatgatgccgggatcaattctcctcatttggagattggcccgttccggacctgggccctggcggtccctgcctccggcgcggtggcgggggccttcccttctttcaggagggggctgcatttccggagcgtcggaaggtgcgtccggggcggggggcggcggcgcgtcctgagcgaacgcggagcatgcggcaaaggccgcggcgataatcatttgcttggtcataactttgagtggtgaggtttgatgcgtttcggaaaggggcgtcgcgctgtgatatctcaaacaggtggaaacgcctccctttgctaggatgaacccccggaattcgtcctggttgcaaaataaaaacgtgcgtgctccggaaaggggcggccggagcctttgcggggcttcccttttttctgccggggtgcagaatggtaaagctgttgaatatgaaataaatctgtaaaaaaagaccgcagcccggaagggttgcggtccagccgtgtcatggagggaaaaattattctccggaaatgaagcggagataggccagccaccactggtcgccacccagcagccagatcagagcagcgctgagcagagcggggccgaagggaagattcctgccgaaccccatgcgtgaaacgactgcctgcacaatccccagcagggagccgaggaaaaggcagaacaccgcgccctgccatccgcccacgcatccggccatcatcagaatccaggcatcaccggagcccatggcttcccgctgcgcgcgaatatccgtcatggttccttccacgctttccaggtcttccagcgggaaaacgtctccgttctccagctctatcctgtcctggcgcaggatgacggagcagggagggagcgtttccccgtcaatggtgacggagcccccggaaatgacggccttgtccgtggcccggtggaaaagcatggaccagtcgtgaggctgtccgttgataatgagctggagctcgtcccggtcggattccggctccttcaggctccacggagcgggagcgtcaaagtgctgcttccaggtgccgaacaggagcttgcccatttcaatcaccagcctgatggcggcatacccggcgattccccccagcacggaggccgtgaaggcgtccgtccaggtcatgacgtcattgtccggcaggagaaacgggtaaagggcacaggctcccactccggctgcggcgccgatgagcgcctgggtacggaatacgatcagatgctccgcgtcaatgaacatgatgacgatggccatggcagtccacaggcagagcagtatggcggctcccgcggaggcgtccgcgtacttccaccccagggcggcgaaaagcagggccgtaagcagctccacgaagcaatagcggaagctgatgcgcgttccgcagcaggcggattttccccggagcgtcagccagcttagcaccggaatattcaggtaccacggaatgggttcctcgcattccgggcagaaggagcgcgccggatcattgacggagatgcccagcggcgtccggtaaatgaccacgttcaggaaggagccgatgcaggctcccatcaggccgaaaatcagcggaatcagccacgcgggaagggcgtcagacatgggagggtggggaataagtccggctgggcgtctggttgatgcggtcaatcagcagcctcagcctgccgtaattgccgcgtttgatggggaaaatgaggcgtggcagccggtccaggtggggttcgtccgcctcatccgggagcggtccgctctggaccattcttcccccgggcaggatcaggtctgaaaaatcccgttccaggtgctccacccactgggcgggcaggtgcgtgttcaggcggatgacgatggcgtccctgacaaaacggtaggagtggaaaatgcggtagaagcggtcgatgtgctccatggcctccgccggattcttggtgacgtggatgaggtgcaggtcatccgcggaaatcaggccggaatccaccagttccacgcggatgaaggccagccagttcagccagaaagtcttgccgggggaatcgagaaggacgatcgggtaaatggtggccttccccgtctggatcagggtgagggtttcaaacacctcgtccatggtgccgaagccgccggggaacgccaccatggcatcgctttccgctacgaaattcagctttctgacaaagaaataatagaaattgatcagcttgtcgctgtgggctaccacgtggttggaagtctgttcatacggtagggtgatgttcaggccgaaggagcgttgctcgccggctccttcattggccgcctgcatgatgcccggtccgccacccgtaatgaccatgtaaccgtgttcgctggcttccctggcgaactcccgcgccgtttcatacgccggctcatcattcctgatgcgcgcggagccgaacacggaaatcttgcggatgtggcggtacggggcgaaaacgcagttggcccggtacatctcccgcccggaacggatcaggacggtaaaatcgtggtcggaggcttcggactgcgccatgttgatgcccgtcttgatatactcctggaggtaacggggatcgtgcctggtggaggctatttcggaaagttttttgacgactccttccagagcctggtagctggtgtccatggacatggtggaggggcgcttcttgtcttcccccgtaaaatccctgttgtccaaaaaatcaggatgcttcatgagttggtatataggtttgccccactatgccagatgacgcacgttaagtcacagaaaatttgccggcggacatgaaaagagttgattgttgaaaacagatcgttaaattgctccccgcacgggcgtttccaaaacatgccgtaggtccttcaggcggattgcccgccatgcccgtgctgaggggaaacccggtacattacatacgattatgtcggaaaacgaaaccactactgcagaagaaaccgccgttaccacgctggcccgctttgaagttcccagccgtctggaaaaaattgaagacccgaatgatgcgaatcatctgaccttcgtggcggaaccgtttgaaaacggttacggccatacgcttggcaactccctgcgccgcgttcttctgggttcacttgaaggcgccgccatcacctccgtccgcatcgccggcgcacagcatgaattctcctccctgcccggcgtggtggaagacgtgacggaaatcgtgctgaacctgaaaaaggtcaagttcaagcacaacggcaaggaaccgcgcctgctctccctgcgcgtgcacaagcagggcgtcgtgaccgccgccgacatcactgacgacaccacctaccaggtggtcaatcccgatcaaatcatctgcaccctggaccaggacaccatgttcgaatgcgaattccaggtgcgcgtgggccgcggctttgccaccggcgacgaaaacaaggtgccggacatgcccattggcgtgatcccgatcgactccattttctccccggtcacccgcgtgaagtactccgtgcagaatacccgtgtgggccagatgaccgactacgacaagctgatccttgaagtatggacggacgggcgcatctcccccgcagacgccatgctccaggcctccgccattctgcgccaccacctggacgtcttcgtcaactatgacgacaagcaggtcaactttgaagaagctccttccgccgtccaggacgaggaaacggcccgcctgcgcaagctgctcaacatgagcgtcaacgaaatcgagctttccgtgcgcgccgccaactgcctcaacaacgccaacatcaccaccgttggccagctcgccatgaagagcgaaagcgaaatgctcaagtaccgcaacttcggcaagaagtccctcaacgaaatcaaagacaagctgctggaactgggcctttccctgggtgttcaggtggatccctccctgcttaccggtcccgtgccgcaggccaagccgcgcctgggtctggaagaggaaagccccgtgggcctggcagacctgattgccgccaacatcgaagacgacgacgactaaatctcacaaaaccaacacacatagaaaaatatcatcatgagacacggtgtaaaaacctccaagcttcagcgcaacgcttctcaccgcagggctttgctcgccaaccaggcatgcagcctcatcctcaacggacgcatcaccaccaccctggccaaggccaaggctctccgtccctatgtggaaaagctgatcacgctcgccaagcgcggcgacgtgcattcccgccgcctggctaccgccaccattcacaacacggccgccgtcaagcgcctgtttgatgaaatcgctcccctctgcgcggaacgcaagggcggctatacccgcatcgtcaagctgggccagcgtctgacggactccgccctcgtggccatgatcgaaatcatcgatctgccccgcgaaacggctgaaaaggaagaagctcccgcaaccacggaagcaaccgcctaaggccgttccctgacacatcaggtttaaccatccgccccggcctctcgcagagaccggggcggattttctattcatattggcggtaaagagattacggaggaagtgcggtggcaagatcgctcttgcttctttcctgccggaacggtataattcagcctcaactatggacgcagtattattgttttccggacaaggtgcccaaaaagtaggcatgggcaaagatttgtatgaccagtatcccgcagccagggccctgattgagcaggcggacaaggcgcttggggaatccctctcctccatcatgtttgaaggccccggcgaagaactgacccgcacctgcaactgccagcctgctctctacgtgcatggcctggcctgcctggccgtcttgaaggagctggcgccttccctgaatcccgtggctgccgccggcctttccctgggtgaattcacggctcatgcggctgccggaacctatacctttgaagaaggccttcgcctggtccagaagcgcggcgcgttcatggaggaagcctgcaacgccacgaagggcaccatggcggcgatgatcggcgggacggatgaaaacgtcatcaagctggcgcaggaatgcgacgtggacgttgccaacttcaactgccccggccagacggtcgtttccggcacggaagaaggcgtggacaaggccattgccggagccaaggctgccggctgcaagatcgccaagaagctcaatgtggcgggagcctaccattcccgcctgatgcacagcgccatggtgaagctggcggaggaactcaagaatgtctccttcggcacgccttccatgcccgtctactgcaactatgaagcccgcgtggtggaagggccggacgacatccgcaatgtgctggagcaccaggtgtgcggctccgtgcgctggacggcctccatgcagaagctggtggaccagggccaccgccttttcattgaactgggaccgggcaagacgctggccggcatgatgggccgcatctgcaaggatgccaccgtcatctccatcgaagacgtgcccagcctggaagccgccgttgcggaattaaataaataattctccgtaacagtaattttcaaaccgccggatcttcaacggtcccggcggttctttatttcaagttatccgacggcacggcgtcccggcccgggtgcaacacggtggcggacattccgccgcgctcttattccctgccgggagcagcggtaatgccgcacttttccacaagcgtgtggacgtagcataaaagcttgcccatgaaaacgaggatgcagggaatcaggatgattacttccagttcggcatggttcgtcaggaaaaatatcacgatgccaaagcagaaaaagagggttgccgctgcgtaaaacaggatgcggatggaaggctgctccttctttgaaggctggagcgccttgaatttaatccgcctctgcagaatggcggaaagggggacccagttccgggaatcttctttcctgaccatggtggtggaaaacggaagcttgccggctgccgccagcgtgtcgatcacttccttgctgacgggaccggcggttttctcatcggtgcggtaatggtagagcgttgctctggcgggtatcgggctcataggctgcaggggagagagcggagaggaggaaaatgtttgcgtctggtcagcgttccggttcctgggcgggcattttcctcatgcctccggtaagaaggtgcatgtacatcagcatctttcccatgaaaaacgctatggcaggcacgaacagcacttccatgtaaagaatggtgtggagcatgatggaatgcgccacgccgcaggccagaaggagaagggcaatgatgtaaaacaggaggcagcttttaggagggcggcaggaaagcatgaaggcggatgccctgaggcgcgccaggcgctcctggcggcgcagctccgttgcgagcggcatccagcactgggaatgttcctcccggatcatggtgtccggaagaattttcttggagacaagcagggcgtggaggtctgtcaggcagatagggcccacaatcttgtctttgacgcggtagtgatataatggggtacgttgggaagccattctccttacataaggcatgaaaggaattccgtcaagaaacaagcgtaacggaatggaaggcggaattcccgaatttctaaagaagttccgccagggaacggattttactggttgccagggaaaaatccgcctgctccgtcacccggttcgggatggagatgacgggcattcctgcgcggtgtgcggcggtggtgccgttctgggaatcttccagcaccaggcattcagccggctgcatgcccaggttttccgcagccttcaggaacagggccgggtccggtttgacgggaaggccgtcgtcacggcagatgacggtctggaaatagggcatgatgtccagcctgttcagccagccgtccacccagcggtgggaagagctggaggccacgcccatgggcgttccggcttccgccaggctccggatgagttcgcaggctcctggcagaaggccggcgtgctccaggtcgcggacgatttcctcctggcggcggccgttgacggcttcccagtcgaaggtgcggcccgtcagttgttccagatgctccccggggttccagtgggtgtagccgctccccaggcactggttgaacaaatccagggggagggcgtggccgcaggatgcgaacacgcgttcccaggaagaataaatggcgtattccgtatccaccagcagcccgtcaaagtcaaaaatcacggcgcgtgcccggtggagcagttcgcgggctttccggacggctgccagggagtcgtcaaggtggtcagggttggtcatggacgggtgtctttttcaagcctctcagcatctccatgaagcttctgtgggccagcttggtctggaacaggcggatggcgatgatggtgtaaatgatgttgggcatccacgcccccagccaggtggggaggtagcctgcggaggccagcgtggggaaaaactcatacaggaacagcatggccgccgccaggaacagcgcaatgccgatgccggacatggcggagcgccgctggaacgtgatggcggaaggaatggcgatgaatgtcaggataatgcaggaaaacatgcgggctatcctgacgtgccattccgtttgcaggcttctgaggtacttggcgtttgtcgtgccggacctgatgatttcctggagggccggagtgccctgggtatccacgcggacgttgggggaaatcaactgccagggagtctctggataatgctctttcaacgtttggtattcctgcccggcgaacacgggcacgtcgttcagctggcggggttcctcctgggaataattccttttgatggcttgccggaatgtccatgttctggaagccgggtcccacatggcttcatccgcaaacagctcgtactccatctttccgggcgcgctgaactgttccacgcgcacctgcctgaacggctcgccgggggagtctattccgggagggtcgccgaggtaccagatgcgggattccgcgtcgttcttgtagatggtgctccgggaggcgtcgtcatttttattctggctcagggaggaaaacatcaatttcctgtacagagtggaattgggagcccagtgaaacccgaagatgccgaagtagatggccgcaaagacggcaccgatgatgaccggggcgttgatccggagcagggatctcccggattgcagcatgccggtgatttccgaggatgaggaaagcttggtaagcgcccagagcgttcccagcagaagggtgtagggaaggatcaggttcagaatcatgggcagctggctcaggtagaagcggaaggtgcccgccaggggggaatccaggttcatcaggtcccccacattgtccgcaaagtcgccgatgatgtaaatcagcgtgaggatggccgtgcacatgatgaaagccgtgaaccaggtacgcgccacatacctgtccaggatgcccgagcggttgtacagcagcatccccagcgccggaaggaaacagcccaggagaatgagccagggccgcagaagctgggcaaggggatattcggacggcgtgccgggaatttcccattgcatctgggaccattcccggggcatcaggaaccaggccgccgttcctcccagcgcaagcaggaggaggaatgcgaaccattggcggaaatgtcgggcctggattgccatgaaaaagtaaggtgggacaaggatgccagatcgggggcgggaaataaagcgttatttggccgccgggcagggacggaggcttgccggaaccgcatgtccgtgcgcccgcgcctgtccagcggagggcggtgcggcacggctccatgcgggccggaatggcgtgcggaagatattctcctgatagaagttgagtgttgtcaacgtagacaggatgggataaaatcttcctgacaaccgctttccgggtacagcttttccatgttcaaacgtcttgttcaactgtttcttctgctccttctggcagcagtgggcgtcctggtgtggtttgcgtggtatgtgtccactccgttgctcgttcccgtggggggggatgaaccctccgcttctcccgttgcggattccctggtgatggagccggtggaagccgtctccgccgacggtaccgccattgaaggctatctggtgcgtccggggcgtccggaggccttgtccccgcgccagagccgcgtgcgggataccttgaaactgcgcggaagaatgccgcatctggaggcgaagccggagctggtggtgatagccacctcctgggaccagggggtgaaaggctccctgccgctggcggaaggactgaccggagccggttacacgtgcctggtatggaatccgcgcgggaaaaacgacgcccggaaattctgcacgtacggattgaaggaatatgcggacgtaacggctctgctggacgccgtatcccggaaacaggggggattgccgcccgtggccgccgtagggcaggggtttggggcagcggtgctgctgaaagccgcgtctgaagatccccgcatccgctgcatggtcagcatggactgctttccttccctgaaaaccgtggccgtccgggaaatggagcaggactggggcaagcccctgtgttatgccgcgtactggctgctggatgccggcgttgactggcgtgcggatttcagtacgtttgacgtggctcccgtagacgatgccctgaaactggattatcccgtcatggtggtctgcacgaaccagtacttcttctccaccctggaggattgcctgagcatttacgactccctgagaaacgagaaaaaacaactttatgaatccatccgggaaggcgagccctacggcacccgggagcggaccttcctccattccattgaaggaaaaaagggggagaaatttgagaaaacctacaaggtcaacgtctatgccggggatgacgagttgcaggctggcattgcggaatggattcatgagaatacgcgcatgcccatgcccagggtgttgtcccatgaaacctacagtgcacctgctacgggcaccgctccttccggttcatgaaccgtgcctctccttttgctgatgatcccgtgagtgccaatcaggaaaacacccgtgaactccgcgagaaccgccgcaggcgcagccgtttcatcctgcctgcgccgcgccatcttgccgccgtggcggtgggggcccttcttgccgccgtgctggtgcactacctgggcttcatcgttctgagctggtttgacctgggcattcatgtgcacaaggcacccgcggttcaggaggaccggaagccgctgcctgagaaaatcgtgctgaaagcggacgaccgtcccgcaccggatgtggcggaagtggttgaaaaaccggatatcgagcagcttgaggaagtgccgccggaattgccggacctggaggacatgctgccggaacaggtggtgatcgctccgggggaaaccagcttttccgccgatccggttactccgtccccgccggaatccctcgcccccagaatgccgcaggtggacatgaatgccgtcgcgaagggactgcctgaaccttctccgcccgagatgctgaaaacttccgccagcccggcgactatcaagacggcggagccggacatggtcaacccggacgaatggtacaacaacaagctcaagggggctggcggccaggatgattcccatctgccggacggcagtaaatcactttcccagttgatggcccagtcctccctgggcaaggacagcggttacagcaggctgggcgcggaccttctgtttgaatacaacaaggcggtgatgaaaaattccgcgcgcctcagcatgcttcagctcgccgggctgatgatgaaaaacccggacacgattttcattgtagaggggcatacggacagcttcggttccggagaatataatgccgtgctctccctgatgcgggccaatgccgtgcgccagtggctgaaggacaacggcattgccctgacgcgcccgaacggggaatgcaggctctacatacgcgcctgcggggcctcccgcccggtagtctccacgaagggggaccggaatgcccaggctgccaaccgcagggtggaaatccacatgcgcaagccgggagaggaaattcccgccggaagcctgcccgtcacgtatgcggtggatatgaatacccccattgcccgccaggtgcgggccggcgtgggcgccgaggccagaatccccgcttccgcaggagaaaggaaaacggcccctgcggcgcgtccgccgtctgccgtcccggcagcccgtcccgctcccgctgcgccgggacgccgggagaagcctgcgccgcggcaggaagtcatccctgaggcggaacccgttccggaaaccattccttccgccgaacccgtggaagaacacattccctcggcggagccggtggaggaggatattccgctggcggaacccgtcgtgcatgcggagaggcgcgccgcggtgaagggaggactggcctgaaatggaactgatgcgttttctgccggtccgtgccttgcccaggcccggactgccccggtatctcttctcctttgactttgacgataccctgttcacgttggggggccctgcggaggaaagacgcgtttttttcagaaccatgcgtggactccgggcgcggtacggcgtgctctggggcatcaatacggggagggaccccgtttacctgcgggaagggttgatggacatgttccagggtaatccggaagcgtttgccccggattttacggtcacgatggaacggaacgttcatctggcggatgcggaagggcgtctgatgcccggcgttccgtggaacgatgcctgctccgtggcccatgacgacctgttcacccgtcacggcggaatgctggaatcattgatggaccatctggaacaccggttctccgggctggaactccgcaggcaggccaatgacgctttttccctggtggtgaacgatgcctgcgggctggatgacgtctcctgcgtcattcaggacacggttggaccgtatgatgaaatcgtcacgcagagggcggggccttacctgcgtttcagccaccgcgactacaacaaggggacttccctggcttttgtagcctcacggttcggtgtgcttcccgtccatgcggccatcttcggagacgggcacaacgacctggacgccatgcgccatttgccggaagcgttccggtgctgtccctccaatgcggcggaggaagtgaaagccatggtagcctgcggccatggatacatcagcccggaaccgcgcacccgcggcgtgctggacggcctgatgcatggcgcgttcccccatttcgggatgaaggcggaggttccggaagcggacgcttgaaaaacgggggacgccggatgcggggaaaatcggtttccggaatgttctttccatgaaagctcccgcggaaaaggaagaatcgtattgacaagaaatgtctgcgatgcagaaataatgacgatttattccgaattccgatcacatgaatattccttcttttacccgaagcgtctccagaggttccgccgtaggctggtttttagtgcttctgctggtttgcggagcgggagccggatattatctgtaccaggataacctggcaaaaaggaaagctgcccaggaattgactaccgagcgtaaaatgaaggaaaagaaggccagggaagccgctgaaaaacagagaatgcagcgtgagcgggaaatcagggagaagaaggaaaaggagaggcaggcagagcagaaggcgcgtgaggaagccagggaaaagaaggaacggcaggctgcggaagcggctcaaaagctccgggagcaggctcaacgcgaagagaaggaaaagaagaggagggaggagctggaacggcgcgaacgtgaggaacaggcccgcaggcaggaggaaaacatccctgtggaagaagatgagcctgaaccggaagggcgttttcccctgcctgtgaagaaccggatgccggagctttccgtctactcaatcccctccagggatgaaattcaaacggataaggacaagccgctggaaacatggtcctggggcaaggcggaaaaaatggcgggaatagaggaattccctgcgggagccgccccgtggaaaagaggtgatgatacccgccgcatgcaggagcttctggaaaaatgccgggaatggaaggacgccaagctttccaccctgaaggcgtgcccggcggcgaaggattttcccggcgttccggaggacggggcccagacggtaagaaggacggtggaaatagattccaacatcggcggctggcacagtacgggactgtatgctccccccggaggggaaatctccttttccctgtccggcgcgcccaaggacagcacggtcagcgtgcgcatagggtgccatacggacagcctgcacaagctggatgaatggaaaagggttccggaaataaccatgcaggttccggcggaccggggccgcgtgaaaatggtgaacccgatgggcggcctggtttacgtgaatgtgggccagcgttccaaacggggaaaagtattcaaggttcagatttccggagccgtgccggcccctctgttcgtcatggggaagaccactccggaacaatgggccgaacaactggaaaataccaaggcgccgtggggggaaatctgtatgccccgcctcattgtcacgatgcccgtggagcagttgaagcggtgtccggatgttcagaaaacggctgaattcctgcaaaaaaacatggccctccaggactggatcatgggatgggacaccaagccggaccgcctgcatcacccgatgcgttttgtcgtggacaggcagatttccgccggggccgggcattccggttatcccgccatggctacgaaggactggacggactccattgccagcggctccatcatccattccggaagctgggggctgtggcatgaactggggcataaccaccagtcgcctccgtttacgatggagggccagacggaagtatccgtcaacatcttctccatggtctgcgaggtaatgggcaccgggaaaaactttgaatcctgctggggcggcggcatggggccgtacggcatgagcgctgagatgaaaaagtacttctccggcgaccagacctacaatgaagcgcccaacaaggtgcagctcttcttctgggtggagctgatgtactatctgggatttgacgctttccggcaggtggcccttcaattccatgacaagccgtacgacaacggcaagctgagtgatgaaaagaaatgggaatgggtcatgaacgccttctccaaggtcacgggaaaaaacatggggcctttctttaaaatctggcgcatgccggtttccgaacgcgccgcggacaggatgaaagaccttcccgtctggctgccttccaaggactacccggcctgctataccgcggaggaataaaaaggttccgggattatgagggcttccgttgccgcactcgcgtctggacggttccggcggcgggggctaggatggcggagctgatgaaatggctgaatgactggctgggctttttcaagccccttcaggtgaggaacctgcaaatcttctggtccgggcaggccgccgccctgatcgggatgtggctgcaggtgacggccatgggcattcttgtgtacgacatttccggcggctccgccacggcggtgggcttcctggccgccctgaacgcgctccctttctttctgggcggcatgctgctggccgggctgggagaccgttttgacaggagaaaactgctcatagccgtgcaatgcgtccaatggctggtggccgtagccctgtttctgctgacgatgctggacatgctccagctatggcacttgtatgccgccgggctggtcatgggcgtcaaccagacggtgggctttcccacgcagcaggcttttgtgggcgatctgatcccgcgcaggcagttgcaggaggccgtgggcatgtactccctggtattcaacacgtgccgcgccgtaggtccggcgctggccggctacatcattgcggaatggggggccggaaccgcctttggcggcaatgtcgtggcaagcctgccgttggtaggctgcctggtagctctgaaaggacgcgttgcggatacctccgcccctaaaaagcagcgcggggccggaagaaaggcctccgggctcaaggcggtgctttctacgcgcagcctgctcttcatcatgatcagcgcgctcattcagaacatctgcgggcaatccctttaccagattgttccggcattgatgcacgggaacccaaggaataccggcctcattctgggagcggtcggagccggtgccatggtgagcatcctctttgtcctgccgtttgcgcgcaaaagcgacagggtgggggccaagctctcctcgggcacgctgtggatggggagcgcattatgcgtggccggcatcattcccgtggtggaaatacaggccctctgcttcttctttgccggtctggctacttcttccctctttgtcacctcttcatccgccgtgcagcttctggcgccgccggaacgcaaatctgccattctggggctgttcagcatcgttacgattggagtgcagcctttggcggccatgggctggggagccgtggtggatgtttggggagtccaggcgacgatcatcatggcgggagggctggaagccttgttctccatctggatgctaagcgttccgttctggcgcaacttcaaattctctccggatgattgtcctgaggcaacctgacggatccttgtcatttggcggcatgggaaaattgccgtcccgtattccgctggcttttaagaattggtcaggaagatgcgattcgggaagttcctggcggcgggaattccggaatgcggcttggaagaggctggaaaggcagttcttgaacctgttttactgaaaagagagcaggcgtattccggtcctgcgggaaaattgaaagccgcttctgccgtttttctcctggcgggaatcatctgcggccttgcagggagaatgtgcctccctgccggcaggactcttcagggaaaaaggaaaacttggcagaccgtccttccgggaaatagccttcctgcttgaatgattcctgtttttcaggcggacggaatgtggatttttccccagcaaaaaaggaggaaggaggtaaatatccggaaaagggaagaaccgggtttgttaatgccccggctttgcctcgtgttcggaatagctgatgcccagcatgcagatatcgtcggcctggttggtgcagccggtgaattttgctacgcaggtaagggcctgatggacaaaatccttggtgctcttgggggatgaattattgaaataatcgatcagcctctccacgcccagctcttccccttccgaattggcggcttccgtcagtccgtccgtatacatcaggacgcgggaacctgccaggagggggaactgggcgttctggtacgtggcgtcatccagcagccccagggcaatgcccctgggcagcggcatcttgcgggcaactccgtccggccccaggataatgggatgcgggtgcccggccgtggaggcggtcatgacgccggtttccaaatccaggtaaatataaacggcggaggcgaacatcgtggtattcgcccgttgcagaattttggcaagctggtggttgagggaagacaaaaaggccgccggattgtccgccagatgggacaactgctccatcaggccgcggagcatggaagcgatcagggcggcgcggatgccgtggcccatcacgtcgcagacgatggcgcctacgccggaattgcccacgggaaaggcatcgaaccaatcgcccgccaccccctctgaaggagtgaaaatgtggtggaaatccacatggcgcgtcaggccgtgttccgtatgggagcgggagggaatctcatagggaagcagggcgaactggatttcccgggccaaatctatctccttctccagggacttgttgcgctcttccagaatacgggctgtttccgtggccttgatctccgtcttcaccagcttggtgacgtcgctggaaatgcccacgatgcccttcaggtccccgttgcggccataccaaggaaacttgctgatctggctccaggaatcatccttgtgaagccatgtctcatgatggaggcgggcgcggatggggcgtccggtagccatgatgtccagctcctccttgcgggaaacatcggacatcgtttgatcgaaaaagtaatcgtccgtccgtccagtcaggtcagccggcgtgggcacgcccagcttattggccgtggcggtattcgccaggacgaagcgcgattcccggttcttgaaataaatgctgtccggaatgtgctcaatcagggtgtggaacaggtccctgtcttccgcggcgcgcagttccgccgtcttccgccgggtgatgttgacccatacccctaccagcatgacggggcggcgctgcttgtccctgcgagcgagaccgttgatgcggacccagctccagctcttggaattcagcttcttcatgcgtatttcaatgcgcatgggcatgtgggaatggccgtccaggtaacggcgcacctcctgggaaaaaaaggcctggtcctcctcgtggatggtaagctccggctgggtgaaaatattgggggccttctccttgcggctggcccccatcatggtcaggcagcggtccgtgtaatggatgacgcccgttttgatattccagatataaaacccttcttccgccgccgccagggccatcttgatcttgtcccaggtaaaaactctctgggcggaatgtctgttgcgtgagggcggcattgcagttgccgttatctaacgacaaaacatctgccttggcaagaggcaaaataaaggaatcattcctgaaaagcggaacggcaggagaaaagcgggaaacgggcccggttgcaccggggcggcatccgcctatctctccttctcctcttcctgggaatgaaggaattgcagctctttcttcaaggcgcttcctacgcggtgcttcgccagataaacctgggcaatcgtgacgccgagctgtctgcggaccttcgccgcatcccactcccgtagcacgtaataatcaaaaatttgaaactgcttgggagacaccttcgctttgacgcgttccagggccgcctggagcaggttattctgccactccctctcccacacctggtcaaaattattcttcccttcgtccggaatcttgtcgatgggatgttcctggctctccgtggcgtccgggctcatcagcatggccgtatccttcttccgcttgcggaactggtcgttgatgcgccagcgggtcatattccagagccagagcttgaaggaaccctgttccggcttgtaaatattcttcttgctctgcttggcgatggaaagaatggtctcctgcaccacgtcccaggcttcgtcctccctcaatccggccttgagggcgacggaataaataagacgccagtacgtccggtaaaactcatcccacgtgcgctggtcctcccaattctccaggcgcgcaatcaggcttttcctggtatgttcggcatattgggaaagtgtctgctcgtcaggctgggactcgttctggggttgcaatgaaggcacattcatggtttatcatgaattacggatgaaagtgaagtgaaagccgagtaataagccggaaaattttgtgcggctcggcctgttcattcactacgtccttcatggagaaaatctttcaagggaacggacatgatcaggaaaacgtcaaaacgcaggggaacctccgtcatcgcggccctggttgtgctgtgcgcggtgctggggtacggcttgatggaatggaagccgctgacggatacgccgcaggcggtgcctgcctcccgggaggcgcccgggaagggaagggttccggagaaaatctctataccggaaaagggagaacctgtcaggttattcacaataaatgctggcaactactttgtaccggaagatccgcgcaggagcaacttccaggtaaaatacaagcccgtcgaagcacgggaggccgtggccgaactcatccgtcaatccggtgcagaaatagtaggattgtcagaaatgggtggggaagccgccgtgcgcgacctgcaaatgcggttgaaaagaaaaggagttcagttaccgcataaggtcctggtcatgcggaacggagaagaccggggattggcccttctctccaaatatcccattgtggacaaccgttccgtgacggacatgcctgtatccggagaaacgaagaggaaaaaaatgatgctgcggggcattctggacgccacggtgaaaacgccggatggccgcctcttccgcctgatgggcattcatttgaagtcccgcctcagccgtgacggctccgcggaagacacgcggcgaagggaagcgtatgccctgcgggactacctgaatgaagccatcgcctcccaggacggcatgccgttgcttttgtacggagacttcaatgacggtccggcggacagcgccttgcaggtcatccaggggccggctaaaacggaataccgcctgaaccgcctgaaacccagggattcccgcggggaaacctggaccatctactacgaagacggagacacctaccactcctttgaccatcttttcctgaacaatactctgaaaaagcgcctcggccgcaagcctcccatgggaatccttgactctcccctctcccgccaggccagcgaccatcgtggcatttgggtggaattgaggtaggtaaaaatgatttattataaaaaagatatgcaataaatatttgttagttttttcattttatgaaatggatatttttgcaatatgaaaatatctttgcaaaaatctaaaaaaataatatcctaataaggatgaaatttgtagtgctgattcttagcattgcaactctaataactgataactatttattatcgattatagatatgcgtaaccaaacaaaaaagactctcgccctctggctgcacagattggcctggttttacatatgcggcgtgattcccaccggtatcatactcttaatattagaaactataaaattcgatttttggagactattcgtcgcggggctggccatatcgggtttgattctgaaaataattaaatatcccgttgttttgtcttcaacaaaatgttactgtgataatttttttgtcgaccgtgaagatgaacgctgtacgcttatgcaattcatcaacgatagcagcgaacgacgcagaattttttatgttaccggcaggaaaggaataggaaaaacactattacttcttcgccttgtcaatgacttggcagagaaaaaaatatgcacaacagtgtactacgtggaaatagaaggcaaagattcttctatattacataagtgtcttgaaatgatagggattccatccgacgaaaaaataggaacagcagaatccctggctgcatttcttgatcaagcatctcgttaccccaaaatcgtatttatcctagatggtattgatagaaacaggaaaagagatgctgacaagtttgctgaaatactgacaaattcatccaaaaacatctctatcattattggaattacaatagaatcactagtatacagccaaactatcacgttatatggaaatttgaaaccagatatatttgggtgcctccatttgcatgagttggaaaaagtttacaacatttcaataactgatcctgaaaagattcttcgtttgtcaagcggcattccaacctatgtacgcatattaatagatttggaacatcaaaatagggctctaaatctttctaatattgaaactattgatgaaataatatggcagcaatactcttttttcagtaatgagtcaaaaaagatcgtgatgttaatggcttacttaaagcttatgggagttgactcgcttcctgaacggaaaatatacgatataatccctgatagcacacctcaccatgtatgtgcagtcctcgattcttcattgatatatcgagaaaatgatacaagagatggaaatatacggatgaatgatttggtagcagaatcctgtcgtaaatgctgcaacaaaaatcaagctgtggaaatgattaaaaattcgcatgaacatctggaaaatatttttgatggcacattgaatgtttctttattgatgttaagcgacactcatttttcagaagaaactggtcgcgaaattctaaaaaatcttttggacggcaaacagtatttatttctcgaacgtctgtggcaatatgagcaaatcggttatctcaattcgtcacttaaagaaagccattcgaataatcaatattttaattactgttatttaaactccttgttgcaactgggacaataccgaagggcatactcggaattagctcgtttggaggaaatagattctgctctgccaactttgagacccacagaaaatatgaatgcagaagattttgatatgctatttctcattatcgatttgcatcatctaagcaatcggttttcttttgccataagcgaaatcgacgcttttctgcaacatctccccaaggttttcaagaaccaaatacaagaggccaagcttttatatttaaaggctcacatattaaagcatcagggaagcgacttgcttttggctgataatattcttagaggcttggataagaacactaatatacaaaaccttgagttgcaaatgaaaattctctactcgcgtatcgctatctatctattctgggatacgtcattcgattacgaggcatcatttaacaggatagacacgcttgccaaagagattggagaatctcccgtcataatgcatgcgcaacggcatcgggcaatttacacactgaagaaacttcaagacatagaatctgctcttactattgtagataatgctttgcgcagtctggaaaaaactcagtacagaattatttatgatttctactttgaaaaagctgaacttttacgaataaaaacttatgccgcagaaaaccagaatcgaaaagtaaaaaatgaaattctttccctttataatcaggctattgcatttgctgatgaaaacggtgatctcaacctgcgaacaatgtcccagctaggtaaaattttaacattacaccagttccatgacatcatccagagtgaacaattaaatgaagtacaaaaaataatgactgatttatccgatgaagctcacaaccacgtactatcaataaactatgcttgtgcatgttatgtcgagaatctgcttcgaggcggggaaattgatcaaaatcaaactagatattgggaaaaaatgcaatatgccgacttggcgcacgccgctcaacatggcggaccagttaaattaaccgtcatgtaagcagttgaaaacatcatgatacgtttgctctgaaaaagtataatggacatctttctttgaacgcaagatattaagttttttctctacttcgtcatagttgtatgtatcctgcgtgagctgataaaaaacatcagcaagttgctcaaattcattttcctcccaaccatgacgtgtaatttgctgaactcctattcgtattcctgaatcgcgatagagctttttataccttccgtttaaacttatcccatgtgattggcttctgtgaagaaatctcattatctcattttctttcatggatataaatatttgatgagtgtctgtatacaaatcattgcgagctcgaattacttgcactccccgtttctcaagataacgccctagtttgttggcattgtctataatttgcttactatattgttcaccaaacatttccatctcgataagaacaagaatgagactaagaatttgatgaaattgcacatttcgtagataatcaggattaatctttgtatcaatgagattcatcagtttctgattattcgtcatgattaatccgctagtcggcccgggaagcgttttgtgagttgcgcccattaaaacaaatggaacttcattgctgaaaaaatggaaaggattggaattggatttgctagctattaaacctaaagtttgagttgcatcgtaaataattataaaatcttctgatacttccagattttgcaaagatggttgaaacaagatgtcagatggacatataagcataccgtcaatttttaccttttgacgtaatgctttaattttttcatagtcaaagtccattatctcataatcaaacggcgcatatataaattttataccgagccggtggcatataagaggcatggaaccatgacctccactatcttccgatgatataagcaaagtgctacccggttgaaagagactcatcaggaggatcataacggcattgacacctgataatgtccttgcatctgaataattactttggaataattcaaaacattgtcgattgaggagactgtagaacttaaataaatgttccgcttccatgaaattatgtttggtctccagactgataattcctcccataatgtatttctcctgaataaaggaatctaacggaatttttccgaacggcgatatggcgttttccgctgcacacaaaggtagaaggcgcttttcttcatactgtagttcctgacaaatttcctgaaactcttctaagtgaccattcatttgttatgttctttcgataataaatagttatcactctttattgtagaattatctgcacattttttcttgggtgaaaattctgaaggatgactctttgtttggtggtgctgacgtgggtgtatatctgagtagtggcgagggagctgtggccgaggatggtttggatgtattttatgtctacgccttcttccagaaggagggtggcgaaggtgtggcggaatgtgtgaggggtgacgggtttgtggatgccggatctcagggccagttttttgatcatgattcttactgactgggaagagaggttgcgacctaggtggttgatgaagaagaacgtgttctgacgggaagaaggcagacagaagcgctggtattcgtgcagggcttccagaatggcgtcctggcatatttggatgacgcgttcctttctccctttgccatagactttgatgaagccgttatggaggtttacggacgcaaggcgcagagcgcatagttcggataccctgatgcccgtgccgaacaggagttccaccacggcaatgttgcggacgatttcctgataacgataccctgttttgcttgaacaggcgtttttctcccggtacagggtggttaggatggaggccacttccatggagtccatgacgggagggagcaggaagggaaccttgatgttgattttaagcttccgcatggggttgatgaagtcatcgtcttccatttcaatgaagttcagcatggctttgagcgtagccatttttcttttcatggttctgggctgaaatcccgacaatgatttaacgtattgcttcaaatcttctgcggaaatagcgggcaaatggcagatgctcctttgatttatcatgaagtcggcaaattgccccaagtcggttgcataggctttcaaggtcttttcactaaggtttttttcatattgggaatgaaacaggaatcgttcgatggttttttccaatagggatgagtgtaatgttgatgtatttggcatggcggaacggaataataagagtgtcccatgggtgcaaggtcctttttgtgcctctgtcactaggaatgccgggagcatggaatcttctgtggtgcaggagtatcgtccggcatggagggaacggggcccgggatgaaggggaagagtgacggtcctctattcttattataagaatgaagttccttttccggagaatgatggaatgctagttccattccatgcgctttcggaattgttcctttgtacattaaccggaaatttcgttctccaacgagtaaaggggtcgataggctttcaggcccggagaaaggatgaaccgtttaaactgcttggatcattatggggcattgcatgccctcggatgcaggaggagtggtcgggaactctggaaaagtggcattccagaggcgtttcaagagctttttcctccctatgcttcttgaaatgtgtggattgaatcagtcggaagttccgttcttccggatggttcatggcgccggggatgatccgggggtgaaaccccgccggatttttattcggaccggaacatatcaggcattcccgtttctcaaaaaatgattgccgtgcccgtgtgaaacgggtagcatgccaaaaatcgttgttcaatcctgcatcatctgtatgagatatttttccaagcattccggaacggcttcgcactgttcctcgtcagggagcaaggggtttaccctggtggaactgattgtcgtcatcaccattatggttgccatgatggccttggccgccagcatgttaagaggcgggggcagggggcagggcctccagtccgccgtggagatggtggacggcatggtgcaggaagcccgcctggacgccatgggcaagggaacgtggagccgcctgattatcgtgagcactcctgaggacgaagcccgcaacatgcgcacgctgggcgtgatgtccaaaaatacgcgcaccggaaagtggcatctggtcaaccgtttgcagactcttcccgccgggttttacatcagccccacctacagcaccctgctggaaggctccaagaagaccaagggcaagtccgcagcccgtagctttgccagccgtgacgggcaggataccgtcaatcttccgggcaaccggatgacggatatttatttcattgagtttgacgaggaaggccgcatgtcccagccgaacgcccccacccgcctggtggtggtttccggttccgccggaaacggcaaggaggagaaaccgactccgatggtggacggcaagccgggcctggcaggcggcatcgtgatttatcccaaaggcaatatcagccggctgaggacgacggagcaggtgattcccaactaattcatattttaccggatttcccattttatgttgaccaagtgtatgaaacagtctcgtgccaaggggttcaccctgacggaagtggtgcttgcgatcggcgtggttgccgtgctgatcgtggtgttcatggccatgttcattccagccagaaggacggttcagtccgctctgaccatccgcgaagcggaccgcatcgtccacgccctgacggcggaacttggagagcttcgcaattccgagcgtgccgctcccaatgccagaaagtcttccaccaccagatatatttccgcttttgacaaggcgttttactggatgcagtttacgtccaaacccgctacgaccattcttgtttacaattacagggcggatctgaccaagggcgcccgcaaggacggcacacctcagccctggctggaggaaggtgggagcatccccgggcagaatacggcggtggtgacgggagtttgcctagcgaacaacaaggaccgctgggatgatttcaaggcgcttgtcggccccgtcttcgccgtgcgcatgacccagctggtggtggagcgcatggattccaacgcttacgggtacaagctggctcccaagtacgggacgatttacaatccctacaaccgcggcaaggtgattacggagccttccctgtacgtttatacgccggagaagggcggcggcctgaatttgccgtggggggcggaagtcctgtaccaggcggagtttttccagctgttgaatacggaccctgaacgtttgcagcacctgacgtgggagaatttgaagactcccatctttacgcgcaatctcgctttccgccgctaacgggcattatctgaagacctctgaaaaatcatgaagacatttgccaaaatcaaatccggcgcgttcaccctgattgagctcctggcagccatgaccatcaccaccgtgctggtgctggtgattgtggccctgacctcccgcggggtggatatctggagatgggtgctgcaggatgtgcggaccaccacgcttgcccgcacggccatggataccatgaccaaggattttgagagcatgcagttccgtgccggtaatccctttgaatggatgctggtgcagcgggacagcgatctggtttcccgcgcgaccaagaccacggcgtccaggaagaagggcggttcttccgctctgaatgaagcccgcgtgaacctgatgaccatggggccggaaggcgccaagatcacgaatgcctcccagttgattttctttaccacggctacggaccgcaatcctgccaagtccagcatggacatgcggaacgaccgcatcatcggtgacgtgaattgcgtggggtacaagctgctttaccgtgaccagattctggaccaggacgctacggcggagtctgacggctttccggtttattccctgtaccgcaatttgatcagcgcggaggataccgtgcagaatctcctgggccagcaggacctttggtccgcttatacccgctaccagcaggatgagaccattcccgccaatttcctggtggaaaacgtggtggaaatgacgctgatttttgaagtggactaccagaagaagatcggcaattccggcagcaacaagtcggacaaggatgccacgcagcgggcgtccgtgctggtgcccgtcatgacgacgggggccaaccggctcggttcctgcacccagatggatgtgtacggcaaccgtctggacatcatcggcagcagcgtgaatattgacgatttgaagtccggacgcgtcactgccgtgacgatttccatgacggtggtgacggatgaaggcatggccctggtggaccagatccggcagaagaagcgtcccgccccctctccggaggaattctttgagcgctatacccggtccttcacccagcgcgtagcattgcccatgaaccgttaggcctgtagtatgggggctgatggaagcgggtttttccgctgccgtttcccgcccggagcgtcctgccgttatttacactgtagttgcaaaatgtctggtttcgcaaatgtcgtcggcaatttgtcccctctgccggagctggtgctgtggcgcgacccggtcgctagaagcggggaggaagccatggccgtggatgaagccctgctggaatggggagagaagcccgtgctgcgtgcataccgctgggcggagccgaccgtgacctacggttattttgacgaggaagccacggcacgcgccatttttccgggagaggaactccattttgtccgccgctggacgggcgggggaattgtggaccaccggcaggacattccctttaccctggccatgcaccgccggggagagaaggaacggccttccagcgccaccctgtaccgatggattcacggggctttggcccgtgttttgagagattgcggcgtggagtgcgtgatgctggacggagacgccccggacggtggccgcgcctgttttgccagccccgtgacgagtgatttagtacttcccggcggggaaaagctggccggtggcggccagagaagagtccgcggcggcgttctccatcaggggagcatccagaattgccttcttcccgccggatgggatgaaatgctggccgcccgtctggcggacggacattccctgtgcgtggaagcggagctgtttcccggcatgaacgctagggtggcggagctgctggcatccaaataccgcacggaggcatggcgctccggcgtgcggcatgagcgtacttcccatgcccggtgaaccttcccgtttttccttccgatgagttacctccccgatcccggccgttacagtcatctggactatcgccgttgcgggcgcagcgggctgctgcttcctcccgtttccctggggctttggcacaatttcggcgctgccgacgatttcgagaatgcgcggcagcttatccatggcgcgtttgacgccggcatcacgtattttgacctggcgaacaattacgggccgcctcccggcgcggcggaagaatgctttggccgcattttcatgcaggatttgtcccgtttccgtgacgagcttgtcatcgctaccaaggcagggcacctgatgtgggccggaccgtacggggactggggttcccgcaagcatatgctttccagcctggaccagtccctttcccgcatgaagctggattacgtggatattttttatgcgcaccggcatgacccggagactccgctggaagagacggcgggggccctcgtcacggcggtccggtccggaaaggccttgtatgccggtatttccaaattcccggcagagcaaaccaggcagatatgcgccatgctcagggaggccggcgtgccgtgcctggtccaccagctccgttacaacatgttcaaccgggagccggaagagtccgtttttcaggccatccgtgaaacgggcaccgggtgcgtcgccttttcccccctggcccaggggatgctgacggaccgttatctggagggaattcccgcggattcccgtgcggcaggttcctccgtctttttaacggaagaacgggtccgggagcatggggagaaaattcgcagcctggctgccctggcccggagccgcggccagagcctcgcccagatggcgctggcctgggtgttgagagaccccgtggtgaccacggccctgataggcgccagccgcccccagcaagtcatggattgcctgaaagccctggaaaatacgcggttcaccgcggaggagctttccatcattgacggaatggcggacaggtaggcgctgttttttccaatgggagcgtttgctttttctttttatccagttttcccggaatcagggcagcttcaagaattgccggagatagctggccaaggagagcacattgcgcggaataccacggttttttgccgttttccagggtttccggcagcagaaaaccgtaacaagaagtaggcagggggaaagaggtgcggcccagccgcttccggaacctccggagtcaatttggattaatcggtgcggtacttgcttcttccgtgaatccgccggattttcctgcggtgctggtctttccgcaggaaggtgaattttccgttccgaacggaggttttttcttggagtaaagtggaccaggtgttatgttcctaccactttaatttaaagtgtactgacaatgataaccatccaggatttattttggctcatcccatcggcttccgtgctggccctcatttttgcggccgtctttttttaccgcatgaaagcccaggatgaggggaacgaggtcatgaaaatgatcgccaagcacgttcgcagcggcgccatggcctatctgcggcagcaatacaagatcgtcacgatcttctttgtgctgattaccgtcgtattcgcttttctggcgtactgcctccatatccagaatccctgggtgccgttcgcgttcatttccggcggctttttctccggcctggccggctacatcggcatgaagacggccacatacgcttccggccgcgtggcgaacgcctgccgccactccctggacgccggcctgcagatcgccttccgttcgggcgccgtgctcggcctgaccgtcgtgggccttgccatgcttgacattggcgtctggtactgggtgctggactggttttatgaagacatggagctttccatgcgcctggtcgtcatcaccaccaccatgctgaccttcggcatgggggcctccctccaggccctgttcgcccgcgtgggcggcggcattttcacgaaggccgcggacgtaggggccgacctggtggggaaggtggaagccggcattccggaggacgacccccgcaatcccgccaccatcgcggataacgtgggcgacaacgtgggggacgtggccggcatgggcgcggacctttacgagtcctactgcggttccattctggcatccgcggctcttggcgccgcggcttacatggccgtgccggaaatggcgatcaaggccgttctcacacccatgctgatcgccgccctcggcaccattctctccctgctgggcgtgtatgcggtgcgcgtaaagcgcggcgcttcccagacggagctgatggccgccctgaaccgcggcatcaacctgagctccttcctgatcgccatcgcctccgccttcctgctccagctcatcggcctggacaactgggcgggcatctggggcgccatcgtcaccggcctggcggtgggcatcatcatcgggaagagcacggagcattacacctcccatgactcctatccctgccgcaagatcgcccacagcgcgaagacggggcccgccaccgtcatcatctccggcatcggcatcggcatgatttccacctgcattcccgtgatcaccatcgtcgtgggcaccgtgctggcctacggcatggcctccggggactggcatttcaccggcgctgaaatgagcaagggcctgtacggcatcggcattgccgccgtcggcatgctttccaccctgggcctgaccctggcgacggacgcctacggccccatttccgacaacgccgggggcaatgcggagatgagcaagctggacccggaagtgcgccgccgcacggacgccctggacgccctgggcaacacgaccgccgccacgggcaagggcttcgccatcggttccgccgcgctgaccgcgctggccctgctggcctcctacattgaagagctgaagatttccatccagcattggggggacgccaccggaaacaccatgtacaagatcaatgacgcggtgagcgtggaagtgtccaagatagcttcttgcacgttgcctgaattcatgaattacttccaggtgaccctgatgaacccgaaagtgctcatgggcctcttcgtgggcgccatgatgtccttcctgttctgcggcctgaccatgaacgccgtgggccgcgccgcggagaagatggtgaaggaagtgcgccgccagttcaaggaaatcaagggcatcctgaccggggaagcggaaccggattacgtgcgctgtgtggaaatctccacggcgggcgcgcagcatgaaatgatctggccgtccgtgctggcggtcatcacccccatctgcatgggcctcgtgttcggcgttcccggcgtgttcgggctgctggccggcggcctggcctccggcttcgtactggccgtgttcatggcgaactccggcggcgcatgggacaatgccaagaagtacattgagcagggccacgtgggcggcaagggatcggaaagccataaggccgccgtcatcggcgacaccgtgggcgaccccttcaaggatacgtccggcccctccctgaacatcctgatcaagctcatgagcatggtggccatcgtcaccgccggcgtcaacatcgccgtgacgctgttctaaaggttgacagtcattatattcaaggcccgtggattcagtggaatccacgggctttttttccggcggcaggaaggacgccgtggatttttttcgccattgacggaaagtttttttgacaacgccgggcgggaggagtaataaacgcgcagatgcaattcagcactggacagcccttttttagcacgacccgttattatggcaacggctattggtggcgtatacccatgtccggacgggggaatcccgatgtgcagtagtagtatccagctatgaccgtttttcaagaactgctttgattcctccgagagtcaaagcagtttttttattttcaacttacaccatcatccatccatgcaaccaccatccatcatcaccctccaacagcgcagccggcggctgagcgccgatttggagacgcccatcagcctgttcctgagcctgacccagaaccaaactcccggccttctgctggagagcgcggaggtggatggtagatggggccgctacagcgtcatcgcctgcgattacctgatgaccgtttcctgcgtggacgccaggctttccctttccatcagcgacgaccgcctggcttccctgaaggagctggaaggcatgctttacctggacggcctgcgctccctgatgcagcgtctggaactggtgggggacgacatgaggcaggctcccatcacgcgggctctgtacggctacttcgggtatgaaaccgccgccctgttccagcccaagctggcgcagaccatcagtccctcttccgcggaatcctgcctggtattggcgggcacagtgatcgtgtttgaccatttgtacaaccgcctcacccagatcagcctgggcgaacaccgggacctgtcccacgcgccccttcaggagacggaagaaccttccgtcggggaggtttcccgcacgccggaccaggcgggctacatgaagggcgtggagcatatcaaggaactgctccatgacggagaagccatccaggtggtgctttcctcccaggcctccgcggagttccacggtgacgccttcacgctgtaccgccgcatgcgcagcatcaatccctccccgtacatgttcttcatgcggctgccggaagtgacgctgttcggctcctccccggaactgatggtgcggtgcacggacggcaagctccagctctcccccattgccgggacgcgcaagcgcggcagggacgatgaggaagactccgcactggccgccgacctgctgaaggacccgaaggagtgctctgaacacgtgatgctggtggacctgggccgcaacgacctgggccgcgtcgccaagcccggctccgtgaagctggaacgcctgatggagattgaacgtttttcccatgtgatgcacatgacttcccgcgtgaccgcccaggtgaacgacggattggacgccctggacatcctcggcgcggccttccccgccggaacggtcagcggcgctcccaaggtgcgggccatggaaatcctggcggaggaggaacccctgccgcgcgggccgtacgccggctgcatcggctggctggggctggacaggaacggcgtccacatggattccggcattaccatccgcagcatgtgggtgaaggacggccgcatccactggcaggcgggcgccggcatcgtgtacgattcagatccggccgccgaatggcaggagtgcatgaacaaaggcaagattattgacgttattttgaaaggagaagaccatgtttctgttcattgataattacgattccttctcgtggaatctggtgcaggcgttttacgccctgggccgcaagcccgtggtgtacgcgaatgacgatccgcgcattctggacctggcggccagcccggagctggaggccgtgtgcatttcccccggccccagccatccgcgcaacgccgggctgtgcctggagttcctgaaacgcctccccgccgccgttcccgtgctgggcgtatgcctggggcaccagctcctgggctacttcgccggagcggaggtttcccgcgctccgtacgtgatgcacgggaagagctcggacatcatccatgacggttcggggctgttcaccggccttcccaatcccatgaccgtgggccgctaccattccctggtggtccagtccaaggaggacgagccgaactcccgttttaccgtcacctcccgcgggccggaaggggaagtcatggccctgcgctataatgaccgcccctgggtgggcatccagttccatccggaatccatcctgacgccggacggcctccagctcctgggcaacttcccggacaacatcgttccggcagggcagaaggaaaagcgcatcaaccgcattctggacacgctggccgccgggcaggacctgacggcggacatggccgccgcgggctttgcggacatcatggacggccgcatgaccccggcccaggcgggctgcttcctgatgggcctgcgcatgaagggagagaccccgctggagatggcccatgccgtcggcatcgccctggggcgcgccaaccgtgtggaagggctggaaggggactgcatagacgtggttggcacgggtggcgacggccgcagttctttcaactgctccaccgccacgtccctgacgctggccggaatggggtacaaggtagtgaagcacggcaaccgcgccgtgtcttcctcctgcggctccgcggacgccctggaaggcctgggcttcccgctggacgtggctccggaggacgtgcagcgcctgctggacgagcggaacttcgccttcctgttcgcgcccaatttccatcccgccttccgcaatgtgggccccatccgcagggagctgggcatacgtaccctgttcaacctgctggggcccctcattaatccggcgcgtcccacgcacatcctgctgggcgtggcccgtccggagctggtggaactgctggcggagacgctcagccagtcccatatccgcagggccgccgtggtgtacggcgcaggagggtatgacgaggtgacgccgctgggacccaccaagatgatgatcgtccataacggcaggctgacgcccatgaccctggaccccgcggactacggcatccagccctgcgaaccggaggacctggccgttcggtccaaatcggaagccgtggctgtgctgaaggacattctggcggggaaaggcccgcgcgccatgatggacatggtgattctcaatgtgggggtggccatgttcctgctggaggaccacatggacctggccgtctgcatggcgaaggcccgcgaggccgtctgcgccggggtaggaaggagaacgctccatgctgcttgaccggttcagggaagccaaggcggaggaaatagccctgctcacggacatggcctcccgccgggagctgccccgtccctggaaggggcgcaggccggacttcctgaaagccattgcggagccgcccgccgggcagcccgtggccgtgattgcggagttcaagcagtcctccccgtcgcgcggcgtcatcgccaccgggctgaaaccggaggaagtggcggaacagtatgccgcggcgggcgcttcctgcatctccgtgctgacggaggagcggtatttcggcggccgcatcgggtatctggagcgcatgagccgcgccgggcttccgctgctgcgcaaggatttcattttccaccagctccaggtgatggagacggcgtccacgccggcctccgccctgctgctcatcgtgcgcctgacgccggacgcgcggacgctccgcatcctgagggaacaggcggaagcctacggcatgcacgccgtggtggaggtttttgacgagtcggacctggcaattgcccgggaatccggcgctcgcatcatccaggtgaatgcccgtgacctggatacgcttgaaacggacagggctgcctgcctggacatggggaaactccgccgtgagggggaggtgtggatcgccgccagcgccatgagcgccggggctcatctcagggaagccgcggaagcgggcttccaggccgtactgatggggactgccctgatggacggcggaaagccgggtgaaaaactggctgcaattttagaagaaacaacatgaagaagcattcattcgcaatcaaggtgtgcgggattacccgccagagcgatttgtcaaccgccatggggatgggagcccatttctgcggattcatctttcatcccaaaagcccgcgttatattgctccgtcacgcgccgcggccctggactccgcgctgatccgccgcgtgggagtcttcgtgaaccagaacgcggaggaaatcatggacatcatgaaaacggcccggctggaattcgcccagcttcacggcgcacaatccctggactgcgcgcgccgcatcggtccggaaaaggtgatccgcgtactgtggccggaccgttatgaatccctggacgcccttcagaaggaaatggaactctgggcggacagctgcgcctggttcctgctggatgcgggcagccagagcggcggccacggcgtctccctggactggaacgccctggcttccctgaaatccccccggccctggttcctggcgggcggcctttcctccgcttccctgaataaggcgctggaacagtgcaccccgaacggcattgacctgaactccggcgtggaagccatccccggccagaaaagcccgcaaaagctgctggcggcccttaaatcactcatctcctacaccccttaccatatcgcatgaacaaagaaggatatttcggcaacttcggcggccgcttcgtaccggaagcgctgcgccccccgctcatggagctggaggaagccatggccaccatcatgccgtcccgcgagtaccgggacgcgctccaggacctgctggtcaactacgcgggtcgtgaaacgcccctcacgttctgcccccatctctcggaaaagctgggcttccgcctgtggctgaagcgggaggacctgctgcacaccggagcccacaagatcaacaacgccctcgggcaggcccttcttgccaagatgatggggaaaacgcacctcattgcggaaaccggggcggggcagcacggcgtggctacggccacggcggcggcccggctcaagatggactgcaccatcttcatgggggcggaggacgtggagcgccagtccatgaacgtgatgcgcatgaagctgctgggcgcccgcgtgtttccgattgaaaacggttcccgcaccctgaaggacgccattaacgaggccctgcgctactggatttcccatcaggaggacaccctgtactgcttcggcacggcggcggggccccacccgttccccacgctggtcaggcagctccagtccgtcatcggcacggaggcccgggcccagatgctggaacgcgccggaaggcttccggacgtggtagtggcgtgcgtgggcggcggttccaacgccatcggcatgctccacccctttgtggaagatgaaggcgttcgcctggtgggcgtggaggccggaggcaccggggagcccggatgctacaactccgcacccatcaacctgggcagccccggcgtgctgcacggccacgtgaccatgcttttacaggatcaagacgggcagatacagccgtcccactccatctccgccgggctggactaccccggcgtggggccagagcactcccacctggcggaaatcggccgggtgcattacggcgtcatctgtgacgcctccgcgctgaacgccttccagaccctgacgcaggaggaaggcattatccccgctctggaatcctcccatgccgtcgcgtgggtgctggaccatgcggacgagctgcccgcggggggtgacgtgctggtgaacctctccggccgcggagacaaggacctgggaatcgttaaaaaatatctgaacctttaagccgcatctttccatgaacaacatgcagaaatcaccgttgcaggaagccgtggagcgcgcccatgccctcggcaggcgcgccgtcatccccttcatcaccgccggatttcctgacaaggaatccttctggacccatctggagcggattgacggagcaggggcggacatcattgaaataggcgttcccttctcggaccccgttgcggacggtcctctcattgaacaggcctcacgggacgcgctggcccgcggcgtaagcctgaaatggattctagacggtctgaaagcccgcaagggccgctttttcgccaaactggcgctgatggggtatgtgaaccccttttaccagtacgggctggaacggcttgccctggatgcggcggaagccggagtcagcggcttcatcgttccggacatgccgctggaagaatccggcatcttcagggatgcctttgacccccacggactgacgctcgtcacgctggtggctcccaacacctccgtggaacgaatgcgggaatacaagccccatacctccggcttcgtttacgtggtttccgtgctggggaccacgggaggaaaggtggacctgacgcagagcgtcacggaaaccatgcgccgcgcccgggccgtatttgacgtgccgctggcgctgggcttcggactccagacgccggaccagctggatgccctgccggaagacgcccgtccggacgccgccgttctcggcagcgccctgctcaggcacattgcggaagggaaggatgcggcggaattcctgggcaaatggaccggaaagtaaaataacattccccgttaacgttaaaaagaggctgtgcagttgttctgcacagcctctttgctgctggccgcccgtcaaagataaagtaattttgacggttttccggcgcctgcaatcaggctctgtcaataggcataactgacgccggcgttaaaccggtgcgccgtggccttgctccttccctcaaactcgtaccctgcatacatcctccagcgcgcgttcaactgcagggcgctgttcacgttcactctcaccccgttccggtcaggagacgttccttccgcttcccagcggtacccgttgagcagccgctccgcctgcgcacttgggttcctgcggtacacgtccggcacgtagctcaccatcgcgctgttgatccattcccggtctttcagctcactgcggtgcgtcaagcccactcccaccggtacgctcaggttcttcaggcgccccttttcaaagcgcctcgcgtcccagcccgtttccgtaaacgcctcctgcgtcacgtccgtatactccagccccagcatgacctccattgcaacggtctcgtttacccggcggctccacttcccggtgaatgttccaaacagggtttcattggtccacttgccgtgggaccggccgcccgtgtggaaggaattcatcttgttgtccgtccagccatagcctgccgttcccgtcaccagcaacgtattcttcctgttgagaaccttgtgccagccgccgtagagcatgccgatgcgcgtctgctggtcaatatctcccgcaaagctgcgcccgcgcatcttgccgtacaggtctccgaagcccaggcccaggatagcgtgggaagtgattctcctgtccgctcccacggaatagccgccgccgtggtagtcaaatccgtcccgtactccctcggaggcgtggttgaggaaatcccccatgcccttgacccagtagttgttttccggcccggtgatgaagcgctgggcatccaggttgcccagggcggcccgggacatcccaagcgcgttggcggcgctggaccacatggagttcatagccagggtacctgccagttccggaaggatgtcccggatggcggagtcctcggcgggagtccagaccagttggagttgttccgggaagccgtcaccatccgcatctacccactggtggctccaggagcccatgtaggcataggggctgtccacccggtcggacccggcagccagagaatgggcgccggagaagtcatccgtgtgggtctggttggagtccgtcaggacgatgaaggtacgctgctgcttccaggaattgtccgcatagaaataatcggcggatatccccgtgtccataatccctatagagccgcccagggtgaaggaatcagaggcggagatggagaggccggtggtgtttgcctgcgtggcggtttcctgagcctgcttttgcatgtcaaagacgaagccgcgggaaagatccacgtttttggcattgatgaaggcggtggttccggggcgcaggacggcgtccccattcgtgatggagaaggaggcggcattgatgacgctgcccccggtgatttccagagtgccgtgttccagagtcatggaggtatcgtcccgcaggccggcattgccgaagacgacattgtgttccaggatgagggagccgccgtagagggtggtttgtcccttgaaatcgctgtagcggctggccacgaggtgggcgttgtccccctggtagagttccccgctgaagatgacagtgccatccgtagcgtgggagatgccgtcgtcatccgtgtactggttgagagagagggtgacgttttccgtagaactaaaataagccgcactggtgatcggatcattaaagcgaacctccttttcttgggcggcggccagctggagatggttggttccgtctacatgaatggcgttggcaacgccgtttaccacggagaaggagccgtcattgtgttgagtgaacgtccccccggtcatgttgccgctgaagagcacgtcatgcgtgaatgccagaaagcggctggaattgtcggtagtgatcccttgcaggtaaatggctccaccgtaggtagaggaatagttattggtgaagatggcgccgttacggatcgtgaggaaagagttaactccctgcatataaatcgctccgccagaggaggtggagatggagtaggagtctgaggaagcataattcccggagaaggtaacattgtttcccagagtcagcgttgcatggtctccctccatatgaatcgctccgccagaggagttggagtagttggaggagtagttggaggaggagtctgagtaagcataattcccggagaaggtaacattgtttcccagagtcagcgttgcatggtctccctccatatgaatcgctccgccagaggagttggaggagttggaggagtagttggaggaggagtctgagtaagcataattcccggagaaggtagcgttgtcctccagcgtcagcattgcatggtctccacgcatataaatcgctccgccagaggaggtggaggtggaggcgatggagtaggtgccggacttggagaaagtataattcccggagaaggtagcgttgctccccagggtcagcgttgcatggtctccctccatgtaaattgctccgccaaaggaggtggaggggtagttggataagtgggaggtggagtcggagaaagtataattcccggagaaggtagcgttgtcctccagagtcaccgttgtatcatctccactcatagcaatcgctccgccagaggaggaggaagaggagtagttggaggaggagaaagcataattcctggagaaggtagcgttgttccccaaggtcagcgttgcatggcctccctccatatcaatagctcctccgtaagcactattgtttgaattatcaacatggttattgagaaattgaacctttccggtgatttccagagatacgttatcatctgctgtgcgtatcactcctgcggtgccattgctccagatgacggagtccatctccagcgtgtactctcccgctcccaggtcgtacaagggattcttacccaggccggataagtctacggcacagagtgcagccggatcagcggagcggaagttgacaggaacggttagaccggtagtcagggaggcgtcatcgttgttcagaatcaccgtatccccggcaactagggcgacggaggagaccagttcctccagggtggagtatatgttattgtctggatcggaatattgagatgcgtctaccatgaagtccgccgcggaggcggagaaggacagggaaataatgggaaccagcagagaggccaggaggctgcggcgcagcaacaaaggaaggatgggtttcatgatcaataataagaataaatatagccttatggcaaagagcagaactaaatagcggatttctaatccgtatttttcttcagccgcaggaagaaactcaagcaggtaccatttgagaaatatcgggtaacaggattgattgttggaaaactatgtatttctatgtgattaagtattttggggcattaagaaatttaccgcggcaaaaaagaaaagaatgaagcatggggttctgaaagatgaaggggtttcgctcagcgctttatttcagaagaggaatttgtcttaaaataattccctatcattgtagtaggattgacatcggattagaaatccgtcacatgccggaaaaggagaaaataatcataggaccccggaaggaataaacagctggaattcctctgttgtgcttggaggagattgattgataaaaggcgggaaaacgcgttcaagccatggagtcctccaagctatctgatggccgttttcccgggaacaaggggtcccggccttggaagtccgtttctcttccggatccgttcactcttcatgtgtttcaaacggatgccggttccattgcccgaccatgcggagacgtgccccggagtcctgtgcaaacgcttcaccatgctgcgggagtggaaaattttgggaaaatggaccagaggcatatttagtcattcttcctcaatctccaaagtgcgattttcataacttgttgtgaggcatatttttattttgtcctgtcatgaaaagagcaaatgcgaattcgcaatccgccgtctctttatttacatatcattcaaaatttcatcattgaataatatttaacaatcaagggattatctgtttcaaagataatcccttcatagaaaaccgggaaaatctgtttaacggggataattcctttctgttagaaaaccgttgcaggtgattcttttcctttgacagcggattgcgaattccttatttatattcacaatcatatttcccttgccgtgttgtgggaaaggttcttttatgattgaataacccattaattgtcaaacgttacatgaaattgcaccttcccttgaatctgctggccgccctgataacctccttctccggggtaacgcttggaactgccacctttgcaggagtttctggtcttttaataacagtatcacaggcttatgctgcggatgtcgcttttaacgggacacaggttaacgtagcggcgggaggcagctccacttatgacgtgggcaccgttacggcttccaccaccttgaattttgccggggcgggcaacgctacgatcacgaacctgaacggagacgccccggaagccgtgctgacagtgaatcgcgtcgccaacggaggaacggccctctccaccctcaccctgaacggggcgggcaccttcaacggcattatttccctctattccaacacgacagggggaacgcagaacaacatcctgaacctcaatcacgcgctggcggcccagaacgccaccatcaagctgggcggctatggttatgcgaccggggcctccgtcctgaaagcgggcgtgaatacctccatcagcaaactggtgcacaacaacaccgcggccctgattaccggggagggaaccacactgaccatcacgggggactcttcttcctacggcggcagcttcggcggcaccgtgacagttgattacacggggggcggcacgttcaccctgggcaattccgacaagagcgcggcgctgacccccgccgcctccgcggatgccactcttaaaatcagcagcggaacgctttccctgttttccggcaatgtcaactggtcccagaagctggtcatgggggacggcacaacgctcaccgtgcaggacggccccgccgtttccggatattataactatgacgccacttccatcaatggggacggctttaccttctccggggcagccacgttcggcaccggagtgaacctcactacccagtacggcaagaacatcaaattcacgggcgtgcttacggccgcctccggcttttccatcagcgggaccgatagcgagtacacttattacaccctgaccggcacggaaaaccagatcggcgggaccatcgccatcacccgcaactccacttccctgggcatcaacgcttccggttccctcggcaccgccgccgtaactacttcctccggcagccagtacctcacttattacggtacggcgggagaagcggcggacgtcattgacaactccatcaccggggcaggcaactttgtagcccagtcaggctgggtgcatctgtccgagaacgtagcgcttacaggcacctacaccgtcaattccggcgccgtactctccaaggcgggctccatcagcgccgcgcttgcgggaggcaggctggatgcaggcaatggaaccatgaatgtgacgggactgacggggaatggaaccatctccgcctccgcgggcaccatgaatttccaggacgccttcacagtgggggaaacgatgggcatcctcgccaacggttccggaaccattacgggcaatgtaacggtggacggcggacgcctgtactacacctccatggacaatgtgggcagcgtgcttcagaacgtgacgctgacttctggcctgattgatttttccggtttccaggaattccaggacctgttcggttccgaagccctggtgaatacctcctacaacctgggcgttgacctggggacggggttcacgctggcggatattgacgagtccctgtacaccatcaccaccgttgacgggaaaacggttattaccttcacgggatccggcgcgtatgataccgcatgggattccgcctgggggctggaaaacgcccccacctccggcgccggaacactggcggaccagcagacgctggccctgtacaacattcgcgccgcgtccatgcaggagggcttcggctccgtgaacgtcgtgaccggaacgggtgacctgacgggagtgaccctggcaggcggctattacaacactgcaaccaatgcaacggccacggagatcactaccggcatctggacggatgtgctggggggcaattacggcctgatcatcggcggcagttatgccaacaactggagcggcaccggcaagtggaacatcacgggtgacgtccatacccagattcagggggatacctccgtcaactgggtggtgggcggcaactacaaggacggccaagctgccggcattacggggaacgtttacgtgtccgtggacggaaatgccgtggtcaaggggagcgtgataggcggtggcaccgcggcccacaactccaccaacaacattgacggcagcacctttgtcgtggtgcgcagcatgcagagcgtgacggatgaaaccgtctcgctcaattccgtagccaggggcttcatcatcggcggcagcgcctatgaagccaactccacttccagcgccgccatcaccggaagcaccaatgtgacgattgacctggggactgcctccggcaccttcgtcaagagcatcgtgggcggttcctactcgggcagctccggaacatatacgatcaacggggactccaacgtcagcatcactgccgccagtgacgccgtctttaccggggccatttacggcggcggctacggcactgccggaacttccacggtcagaggcaattccaacctgacgctggatggcggcgcctatacgggagccctttatgcgggcggcggcggagcaaggtccgccgtgaacgggaacgccaccctcaccgttaaaaaagccgtgttccgagcgggcagcacgctgaatgtgtcggaaggcacggtagggggcacctcctccctgcttctgggcggttacggcaatacggcggaccaggccatctccttctccaatacggtcattaccggcttcgacattgtgaccatgttccagaactccttctttacggggaacctgaaggtggacggctccagcacgctggccctggcgggagacgccggaacgggaatcaacgtgaatggcacgttcgccctttccgcggaaggggaattgaatctggaccttaccgggtttggcgccttgacggacggcatgtccgtgctctccaccaccggactgaccaacatctcttccatcaaggccgtctttgcggacggcgtggcgggaaccatcaccctttccaacaatggcagggacctggtttacacggcggaaaccctcctgctgtgggcgggcggtgaaaacggggtctggagcgcggaaaacatctggacggacggcggcacgcccgccacgtatgcggacggcctggcggtttcctttgcagaccaggccggagtcgccacctccgcggtgcagcttgattccgaggtttcccccggctccatgctggtccgcaacaccaccacccgctatgagctggcgggaaccggagtaattgccaataccgccgttaccaaggaaggcacgggaaccctggtgctgggctccgcttccatcctcggtacgggaaccaccgtagccgtgaaccagggcgttctggcgttcgggtatgatacggacctgccggccacgggcatcacctggggcgcgggttcctccctgggagcggccaacggcgcgacggtcacggtgaatttgggaaccgtgaccaacccggcgttctcccttgccgcggataccaactcattcattaatctggtaacgccttcagaccttaccttcggcaataacatcacgggagccggctccgtccggaaaaccggtacggggctgctgaaattgacgggggccaactccggccacctgatcgtgcaggaaggcaacgtccagatagggggcggctccactgccatcaattggggcagcgccggttcctccgtcaccctgcagaacggcacgtccctgatcattgcgggcaacagcgcccaccacaccatcggttccgatctgattctgggcacggccgcatctgacgcggtctccctgaaatgggtggacgcctcccaggcaaacgccaccaattaccagcataactttacgggaaccgttaccgtcaacggggcggccaccctggtgggccggaacaactgggccaaggaaatgggcttcaccggaacgcttacaggcgcaggctccctgacctacagccgcggagggggcgatggcaggtacaactccaacggcaagctcatcatcggcggtgacgcctccggatttaccggcatgatcaccatgaacgccgccaacgggtacagcacggggcttgacatgcgcacctccatggcgcagggcggggtcaccctcacgtccggcacggataccacgggattcgccttcatgcgcgtgctgggggatattgaaatcgcctccctggacggcacggccaactcccaggtgggcgccgtggggggagcgcgtacgctgacggtgggttccggcacgtataacggcaccatcacggaccacggcgttgccatcgcctacggagccaccaccatctcctatgacaccaccggagtcctctccctgaccaaggtcagcgatgaaaccctgacgctgggcggaacggtcagctacacggggctgacgaacatccagggtggaaccgttgcccttactgccgcaggggccacgtccctggggaacatcaccatggcggccaatacgcggatgacgaccgccggggccctgaatctggcggccagttccacgctgaccctggatataagctcttccatcggcgtgggtggggccttcggggccggtacgttcaacctcaccctgaatggccttgaaggcattacggaagccggggaatacaccctgatttctgctgccagcggacttgatgccgccagcgccatcttcaactgggccggctataccggagacgaaacgctgatttacacgctcgaacagacgggcgccaccctcaagttggtggtgacttccgccggggacgtttggatctggcagggaacggaaggcatgacctggagcgacacgaacacgggagcccagtggggcattgacggctctgcggatacggccgccggccagaacctggtcttcaacagctccggagcgggaaccgtcaccctgtccggcgcggtgaatccggcctccatcacggtgaacaacgccgcgggcagcgactatgtattcgcctcagacggcaccggaaaaattgcgcagggcacgctgaccaagcgcggcgaaggcaagcttaccctgaacctggacaatacgggctgggcgggagccatctccctccagcagggcgagctggtggcccaggtggccaactccctcggttccggggctgtcaccattacgggtggcacgctcacgctggctacggctgacgtccagccgggcatgggcatgatcaaccttcagggcgggagcctcaatctggcgtccggcgcctttgccacggcgttcaccgcagacaacatgacgtggacggacggctccctgatcctgggtgaaaatgtgacggctaccgccgccaaggccctggccaacggaaaaaccgtggaactggccgccggctccatgctgacggtcagcggcgccaatgacaacacggcgctgaacctggatgcctccggcaccggcaccatttccgtgggcctgggaaccagctacggagccaatgtcctgaacatgagcacggcattccagggaaccctgtccgtgacatccggttacttccaattgaacaacgtgaccatgggagcagacggcaccgtgaacctggcggactccaatgtccgtgcggaatggaacggcacggccgggggcgcctttgccaatgacatcatctttacgggcaaccagatattcgccaccaaggacttcaccctcagcggcgatctgagcggaacggcgttctccacccagggcgggggcaacatcaccctcacgggcggcgtcaatctggacggacagctcaaggtgcaccgcggcacagttacggtgaactccgccaatgtgaccaagctgggggacagcattgacatccagaacaactccacgctggcctttgcccgcgacttctcctacggcggcgtcatcagcggcacggccggcagcacggtatccgtaaacgccggaacgctggagctcaccggagcgaacaccttcctgggcaccctctccattgcgggcggcgctacggcgcggctgggtgacgggagcgcctgggccggggccctctccggagccggttccctggtcgtcgacaccacggggaatataacgctggcggccggcaacaccgggttcaccggttccactacgctctccggaacgggcaccgtcaccctcgcgggggccgactccctggggtccgggcgggtcaccgtcaacaacgggattcttgacctggcctcccagaatgcggccaacgccatcctgatcacgaagggaagcctggcaaacgcgggagctaaaaccaccggaaacgtggaagtggccgcttccgccggaacgcagggcgccctgaacaccatcaatctgggcggtctgtccggctccatggtcggctccatcgtcatggaagactactcccggctcaccggcatctccggcggcctggacatgacgggaaagacggtgacgctgaaactggattccggcagccttaccgcgggcggaacaaccgggcagggcgtcattgatgcggacagcctgacgctctccgccgccaacacgaccatcaacctcagcaaccagggcgtcctggacctgctctccgccaaccgggattccgccgacggcgtagggctggtgctgacgacgggaacgctgaccgtggacaactacaagcagatagccttctccccgcttctggcctccctcggttatgccgtgacggaagtcctgggcgcggacggaacgctgatggtcagcggcaatacggacctcgtctacctcgtggacaccacgcccaactcggacaaccccaacatcagcgactacgccgccctggatccctacaaggccgtgggcatcaacggaaccacgctcaatgtaagcctgaacggtgctcctgaagcctcccggaacggagacggcctgaaagtcagcaacctgatcggcagcaatggcgctctggtggtgacgaatacggcggcggacgctgccgccaaccatgccgtggtggacctgatccagaacgtggacgccggaggcaacagctacggcggcaccatcagcggggaccatgtggactttatcaagaaaggagcggaaaccctcaccgtggaaggcagcttcaccggaaatgactccatgctgagctccacggaagggaacattgtcctgaacggtacgggcaacagcctcactacgctggagctcgccgggggagacatcacgctgggcggcaggaatgacggcgcctcccgcgtgacgacggtggaaaacctggcctccggcacgggtggaggaaccctggacctgggccgcggcgcccagctggtcctcaccggccagcaggccggcagccatgtgactgatgtgaccatctccggtgacggcacgctgaccctcggaggaatgggaacggactcctccctgacgctgggcaacggctcctccctggacggcgttctgctggacatccgggaaggttccgcgctttccaccgcggccggctccgtgaatacggtctccggcctgacgggcgggggcgccctgaagctgagcggcgcggaaatgacggtggactcctccgcctcccataccttcaccggtacgctggacggcgcatccggaacgctcaacgtcaaatccggcaacggcagcgtgcagaccatcaagggtgcgggcaatgccggctacaacctgaacgtgagcgacggcggcgcgctgaccctggccggcgcggctgcggaaggcggtaatcccgcccaggctgcctacaagggcattacagtgaacggaggcacgctcaacatcggcagtgcggacgctcccaagacccagttgactcttggcacggacggcttgagcgtgacggggaacagcacggttaccatcaccacgtcctccaccacggtggatggcctggggaaccccttcgtcacctccagcggaaacattacgctgggcgacggaacgggagaagtgacgctggtcatgaccaacctggacaccctggtgacggggagcacggaaacgctgaacatggaactgttcaagacgacggacggcgcgctggtatccctgggcgacaacgtcaccctccaggacatgatcctcagctccctgtatgaaaacctgtctctgaccacgaatgacagcatgacggccatcatcctcaccggcacggcgcgcacggaaaacatcttccgtgactcctccctgacgcggaacgcggccaccggggcggacctgctgtggaactcccgctaccatatggaggaaggcaccaccctgcgcgacttctacacctccgttctgctctcccagaacgcgggcgactactccggcgcggcccgcaagctggccgccgccgcgggcagcacggtcaccagcctgggcatcgcccagcgtgactccctgcgcgaccagatgggctggatccgcaaccgcgtggcgcagatgggcgtgaaccccgcgtacgtccatgaggacatgccgtacttccacatgtggatgcagggcaccgggtcttatgccaagctggacaccaagggggatgaaagcggctatgagctcaccacctggggcggaacggtaggcatggacgtggacatcaacgacaacttcaccgctggcgcggccttcacggccaactacggaagcctcacggcgaatgcggcggataccgcggacggtgacctggacagctactacgtcaacctgttcgcccggtaccagtcccgtaaatggtcccacctgcttatcctgacgggcggctggaatgatgccaaactcacgcgcacggtggattacggctcgggctcctaccaggcccacggcagtaccaccgggtccggcttcggcgccatgtacgagctggcgtacgacatcgccctcaatgaagacaagagcgtgattctccagcccctgttcaacgcctccatcgtgacgacgcgcatggacggctacagtgaaagcggctccgccggaaatgccgggctgagggtggaggaccaggaactgaccacggccgcagtcgccgtgggcgccagactctccggcctcatgggctccaacgtcttcgggcgtgaagcgctgggtgaaatccgggtgaacgtctcccaggacatgggcgaccgccgcgggcaggccaatgtgggcttcctggcggacccctcctacacgcgtccggtgtacggcgccaaggtgggaagcacggccttccaggccggtgtggggttgagcgtccccgtaggcacccagggcgtcatcttcgtggacggcaatgcggacatccgcagcggttccagctccatcaacggaagcatcggctaccgctacaacttctaaaggaagaaaacgtcagttaatcagaaggccgctgcggaataatccgcagcggccttcttcgtgaatgggcgggatttctttataggataacgtgaagagtgatttccgccctctcatgggcggcttacttccattcccattcaacgggcgtttccatgtccggcctcagcgcctggcggaccgggcagctcatggccgttttttccagcatggaacggaggggatggctgctttccaggggcattacggccttcagctcaatcttttcaatccccttggaggattccaccgcgcgcgccagaacgcgcatgcctttcaggtccacgccctttctggccgcgaccacggaaaccaggctcatcatgcaggaggcgagcgtggaaccgagcatcacgccgggggagggaaactccgcgcggccttcaaaagaggcgggcaggtccgtggcaaaagtgatgttggagggaatgtaggtggtttcacagcggaattgcccgacgttctccgtctcggaggtgtaatgagtatcagtcataggagtgtgacagcggaaccctggatcgagttcacctgaatttggttatttttttagttgggccgtcgcggaaatccgatttgcaggggtgccggtccattccggcatgcgcggcaaagcccccccttatccccgttctcctgtgcttgccaggaaatcaatcctgatctgatgcagcccttcaccgagcttcatcaccatccgttcctttcacgatgatggcgtggctgtcaacggaatcttcacgcagtgacttgatctgccggtattcttccgaagaaaagcagcgttccaggctttccctggagggaaaacggatgacgatcacgcggtccggcttccacccggagctcagcggaatgacctcattggtcctgaccaggtattcgccgccgtgtttttcaacaatgggcttcacttcccggatgtaggaatcgtatggagtgtctgcatcggagcttaaagaaaccgttacgataaaataatagctcatatccttcctttccctggtggccggcccctgtgcggctgccatgaaatgctccgtggggaattcgcagttttcatgattcgccggaagcgtccggtgccttgacagggagactaaagccggagggctttgctgtcaatccgtcttccgggcttgcccggacccgtggcgcctccttgtttgtgggaatcgctttacaagggcaggggcccttgtttccggggatgcggttatcaggagaacggatggggagggaggtttccccggcttgaacggaaaagcttacggagtgtgttccgggtgcccttccgccagaatgcgccggatgggttccgcgtaaagctccggctccagcaggaaggaatcgtgcccttttgtggaaacgatggtatggaactccacgggaatgcgcgcggattccagctgcgccacaaaatcctgctgttccgccgggcggaagcagcaatccgtatcaatggaaaagacgagcgagggaattcctgcgcggcggaagccttccagagcggttttaaacgttccgtccggagcgtggtcgcggatgtcgaactccgcccacatgtccgcaatgcggatgtaggcgttcgcgtcaaagcgttccgcaaacttggtcccctggtgcagcatgtagctctgtgtgctgcgggtgggcgtcatccatgtgagcagtccggacttgccccccacttcctttctggcgcgctgttccaggccttcctggtatacgaacgacttgtggccgatgatgcgcgcgaacgccagcccctttttgggggccggtccctggtaatagtcgcccccgcggaaatccggatcaagctcgatggccaggatttgttcaaacagggacaaacggtgttcaatggaagcccggtagccggagccgatggaaatgaagctccggacccgttccgggaactggcacgcgaagctgagggcgatcaggccgcctacggacggtcctgccagatggatgcgttctattcccaggctgtccagcagaagagcctggaggcgcgcctggtccgccgcctccacatgcgggaaacgggagccgtagggcaggccgtccgtaggggatgggctggccggtccggtggtgccgtagcagccccccaggtaattggcgcagatgatgcagaagcggtccgtatccagcggcttgccggggccgatgatgctgttccaccagccctcgtggttttccggcttccagagggacccggtgcccggaacttccggattgtaaccgtaggcgtgctggctgccggaaagagcgtggaacagcaggattacgttgtccttctccggcgtcagggcgccgtactgctcgtaggccacgcgcaccttgtccagcacggcgccgttccgcagggaaaaggagccgggcaggtccagaaatctggtttggacggtgggaagctgcatggatgtgcgggaaggggctttgtcagcaaaaaaagaccggcacccggcgggcggcggtcttcttgaaatctgtgttgggccagggtttacttgacgcccttcttggaaagacgcgtacctgccgtggcgccctggcgggctttaaacttgggattgctcttgcaaatcacatacagcgtgcccttgcgcttcacgatttggcagtctgcgtggcggcgcttcatagaggctaaggaagaaagaactttcatggtgtgtaactccggtttggtgttcggttcgggagacggaatataccgtttggttaagaattgtaaagtcatttctttaccaaaagtaaaattgcagttccggacgaactgcttctgcggcttgcggaagagaagatagtacgcatggacggatttgtaatccgaagtcaagcctacaaaattgaaagaaaaaaggtttgggcaaatttcgcttgccggtgcccggtgattttgcggctccgtcgcctgggagcggaaggctcccgcctttcgtggttgaaacccgttctgtagcgcagcggaagcttccgttcaataaccgttgccgcataccgcctggctggggaaaggagctgggtaatatcaattaaggttcgtacccacgatgccggagtttcgcgaaggacagcttttcccgactgtagaatcaataccggattacaaatccggtattggttttgcatggaagggaaggttctggatattcccttcaaccaactgacgatcaactctgtttaagataatgaaaaagacattcttaaccatcatgctggctgccggcattggttccgcctgcgccgcaactgccgccgcctgggaattttcttccggcactccctcggaacaattcatgacgggaagcggcatcaatctggaaggatggagcatttcctccccggtcaattcagcggcttcctatacggactgggcgacggtgacgggcggggaccgcaacatttctacgcagacggtgggcatgtggctggatttgtcctccctggggtctgccgccactatttacagctttggagagacgggttctctccgcggcctccagcttgtttacaacggggacggcacgtttacttccaggagaacgggagaagcgggccagaccttcaccattgggcaggacgtcattgacggaggatggttcaacctctccatgtccctcagtacggataccaccacccggaaaacggatttccagattttcctgaacggggaaaacatcgtggataccccccagttgttcgcggggctcaacggcggccagaacggaaccgtgaccgtcggcggaggcacgacggatgaacattccttcagcatcgcggatttcaaggcttatggtaccgcattgacgggacaggaaatcaaggaggcgtggaacatggttcccgaaccagcggccgcctccttgagcgttctgggactgatggcgctgctggtgcgccgccggaagtgagagaggcggaaaaaatacatttcaaacggcaggcagcagggcggacatttccggtgggaatgtccgcttttttattgtttcacggaactgttgcagaaagacggctcttctttttccaatggcggctctgggccgccatgtactggtgagtttctgtttttcccggcccttccttcggacgtgcggatgtcatgtaaacggtatccgctgtccggacgggatacatcttttccatgatctgctgcggtccgggtccctgtatggccccgggctgcagcttgcggcagttgcagccttccggaaactttttcctgcatttggaggagtaacagttcatggtgaaatccggaacgggacgggagggcggtgcagtttccgttccggcagcggttcttttccgccgtgggaaggaagcatggaacggggcttcccgggacggcaggccgccggaacgcgggaaggaagccgcatgcgggagaataaagggtttgtggaccggaagggattcgtataaaatgttctccggttttcttatgacgagctccccttcatcctctccttcccgccctgcatttgcccatcagctgggaatgaaaggattcctgatcatggaagggctgctgaagctcgtgggcatgaaaacgctttaccgcctggggcgcgtggcgggcggcgtggcgtggtacttgctgccgcaacgccggaaaattgtggaaagaaacctgcgcattgtgctggatccggccctgcgcggcagggaactgcaaaaattgagcagggaaaatttcaaaaggacgatagccaatttcctgtgctccgcgaagacggccaccctgacggatgagcagttgaaaaaatgcgtcaccatcgcggggcatgaagaatttgccgctcctgcggcggaaaggcgcgggcaggtatgcgccatagcccattccggcaactgggaggcgctggcgaggatacgcgtgttctttccagaagtggaacgttacgggtccatgtaccgccagtttgacaacccgctgatggaggaatacgtatacaagcggcgcacggagcggggcacgcggatgttttccaaggaaggcggcatcaaggctcccatgaagatggtcaaggagggcggcgccctgggtgtgctgagcgaccagttcgtctgggagggggtgtatgtccccttcttcggcaaggtgaccggcacgacgccgttgcccgctttgctgcggaagaggacgggagcggatatggtagccatcgcagtacgcacggattctcccggacactggatagcggacatggggaacgtggtggatttttccaactcggacggttccctggcgggggacaccattgaagtgaaccggagcctggaaacgttgatccgcaagtccgttctggacgtgttctggatgcaccaccgctggaagtccatcgaccgctttgctccgcaggataaaaaaacggacggccttctggaaaacatggagctgcagccgtaccgcattctggtggctgttcccaaggcgctggatgaagccctggtgaccgttcccctggtccgtgcgctgaaagccgtccggcgcgacatgcaggtgaacgtcatctgcccgtccgcgcaggcgggggtatggaaggcggtgccggaagtcacccatgttctgccgcacgattccctgaatcagctccgggaggcgctggccgcggatgaattttacaatgacggtccgctggacctgggcgtcatgctggaccaggacatggaaacgctcaaggcgctggaaccgtacgggcccatgatgttctccgggctggacacgcatcccggcgcacggaaatacaaattccgggtgaaggctcccgtcctgcgcgccgctccccccatgcaccgggttcagctttatctgcaactgggggggctgcacgggctggatgcctggaatccgtccctgttcccggtgaaaaaggcggctgcggcggaaaacgcccccatcctgctggctccgttctccagcttgggcagcgccagtgaatggagtgaggaacaatgggcggagctggtttcccttctgccgggcaggcccgtactggccgctctggaagaagaccgggaacgcgcgtccgctctggcggaacgcctgaatgtggagctggcggtgggaactccggaagccttgttccccgtgatggatgccgccgtggcggccgtggctgtggatggtgacattccgtccctctgctccttccgcggtcttccggtggtgaccctgttttccacccgcctcccggacgtttgccggcccatgggccccttcaaccgctccctgtacagccaccagtgctgttccccctgcttcctgaaggagtgcgaccgtgatgttccctgcaaccgccatattgccgtgcaggaggtattggatgctctgagggaaataacaacctctgaaatttaacgggtttctctaccaagaaaagagcttagtcctttttcttatgatgaagaaacgcctgtgttaaacaggaagtcatgtctaaaggcattaattttaaaaagttgagaaatgatgccggtttaacgctggctcatcttgctgaattgtctggatatgacgtgaccgatatagttcgtttggaacagggagaaaaaattcctccctgcatacgggaatgtattcttgcgttgctgttacaagcacgggaggagggtctggctttggatgtcagaatatggcgtgaacgtgctttaaaagctgaatataaggtagagattttacttggaatggtaaaaggaggaatggatgttttataaacgcctcatggttgaaaagaatttttcctgccttcaatgcacggaactttttaaattttcttcctggcggaagatgtcgcggacctgttccgtcagttcctcggaaggttccggaacgtccttcaaggtgtagtccagcttcagttcatcccacttgaagcgccccatctggtggaaagggagcacgtccacgcgctccacgttgcccaggcgcgccgcatggcgggagagctctgtgatgtcttccatgttgtccgtgaggcccggaaccaggacgtagcgcagccagacgggtttgcggagggcggccaggcgttccgcgaattccagggtggggcgcaattccccgcctgccagggcccggtaccgttccgggttccacgccttgatgtccagcaggacgaggtccgtattcgccagcagttcttcatccgcgttcgcgcccagatggccggaggtgtccaggcaggtgtgcagccccagtttcttgcatcctttcagtacggttctcgcaaaatccggctggaaaaggggatctcccccggaaagggtgacgcctccgcccgccgccagcaggaaatcccggtagcgggctatttcttcaaggacgtcggccacgcttctgcagcgtcccctccgcacgtaggaggtgtccggattgtggcagtagcggcagcgcaggctgcacccggacaggaagaggacaaagcggatgcctggaccgtccacggtgccgcaggattccacggaatggaccagtccggtgacggcagtttcaccgtccggggccggattctgggagaaagcctgcggcatccgcttcctggctgggttaacgggtatggaaggtgcggttgatgacctcctgctgctgttcccgggtcagcttgatgaagttcacggcatagccggaaacgcggatggtgagctgggggtatttttccgggtggtccatcgcgtcaaggagggtttcccgctccagcacgttcacgttgatgtggtgcccggtggcggcaaagtaggcgtccagcagggagacgagcttcgtgcggcgttccccttcttccttgcccagggcctgcggcacgatggagaaggtgtaggagatgccgtccagggagtcgccataggacagtttggctacggagagcatggaggccacggctccgttcctgtcccttccgtgcatggggttggcgccgggcgcgaacggttccccggcgcggcggccgtccggcgtgttgcccgtcttcttgccgtacaccacgttggaggtgatggtcaggatggactgggtgggcagggagttgcggtaggtgtgaagcttgcgcagcttttccatgaagttgctgaccaggctgcatgcgatttcgtccacgcgcgggtcgttgttcccgtagcacgggaattccccttccgtcttgaaatccacaatcaggccctcttcattgcggacggccttcacggtggcgtacttgatggcggacagggagtccgcggccacggagagcccggcgatgcccgtggccatggtgcgcaggatttccggatcatgcagcgccatttcaatgcgttcatagcagtacttgtcgtgcatgtagtggatgatgttcagcgcgtcaacgtaggttttggcaagccagtcctgcatcttgtcgtacagggccatcacttcgtcgtacttgagcacttcctccgtatagcgcggggagggcggggccacctgtttccccttgagttcgtccacgccgccgttcagggcgtacagcaggcacttggcgaggttggcgcgcgcaccgaagaattgcatctgcttgccgatgcgcatggcggacacgcagcaggcgatgccgtagtcgtcaccccagtgcgggcgcatcaggtcgtcgttctcgtactggacggaggacgtttcaatggaaaccttggcgcagaaattcttgaaggcttccggcaggttcccggaccacagcaccgtcaggttcggctccggagccggacccaggttgtacagcgtctggagcatgcggaaggagctgcgggtgacgagggtgcgcccgtcttcccccatgccgccgatggattccgtcacccaggtggggtccccggagaacaggttgttgtagtccggcgtgcggatgaagcggacgatgcgcagcttcatcacgaactggtcaatgatttcctgcactccctcttccgtgatgaggccctgttccaggtcgcgggtaaagtaaatgtcaaagaaggtggagacgcggcccagggacatggccgcgccgttctgttccttcacggcggccaggtagcccaggtaggtccattgcacggcttcgcgggcgttcccggcggggcggctgaggtcgcagccgtaggaggcgcccatccgggcgagttcctccagggcgcggatttgttcgctcatttcctcgcgcaggcggatcagctcatccgtaaggggggaattttcacggtttttgagatccttgcggcgttcggcaatcagcttgtccgtgccgtacagggccacgcggcggtagtccccgatgatgcggccgcggccgtaggcgtccggaagtccggtgatgatgccggcggagcgggcggcgcggatgtcggaggtgtaggcgtcgaaaacgccctcgttatgcgtcttgcgtatcttgttgaaaatatccgccgttttttcgcacatcttgaacccgtaggattcaagggcctgctgggccatgcgcaggccgccgaagggcatcagggcgcgtttcaggggagcgtccgtctggaggcccaccaccacttccagctccttgtcaatgtagccgggcttgtgggagacgatggaggagaccacttcctggtccgcatccagcacgccgccgttgtctatttcccgtttcagcaggactttcagttcctcccagagccggagcgtgcgttgggaagggccggaaagaaactcttcattgccggaatagggcgtgtagttgttctggatgaaatcccgtacgtcaatggactccgtccatgctcccggcttgaatccctgccattcctgcggaagggcgggggattccttcaagtcttttactatgctgatcataaataggatgtagtgaagaagaccggagaaagacgctccgcgcccgctgaaagcccggaagcggcgaaactccgcaccacctgattataccgggaatgttagcggtcaacaaggccaattcttccaggcgggggaactggaacggttgcgctggtctgtttcaggcatctggctgttccggaataaaaaatgagggaaatttacggttatgggggatagttttttctttactctccaaattgccgccaacaatattttaactatcattttgatgaaatcccattcattcctctgtttgttgctggcgggagtttcttgcgcagcctttttctccggcgcgtgcgccaatgagctgccgtctacgctaaagcctcaggtgaacgagcgcgccgtttatgactggaatggccgtcataaggccgtgatggagaggaaccggagcgttaatccggaatatgccgtctttagcgacagcattacccaccgctggggaggggagccttccggagacaacaggggcctggggacgggaaaggaggcatggaaaaatcttttctcccctcatacggtgaccaatatggggtttggctcagattacgtggacaatgcctactaccgtgtgcagcttggggaactggacggaatctctccgcgcgtgatcatcgtgcttttgggaaccaataatcttggcggcaggaaggataccccccagtcatgcgcggacaacctcaaggcttttgtgagcctggtggggcggaagtgcccggcctctaaaatcctgctcctgggcattctgcccaggaaggaaaaggcggtggcgcccctgattgtggaaaccaataaaatgatatccgttcttgctgatggaaagagggtgttttttgccaatccgggcacggcgttcctggcagaagatggcgtgtcgccaaagagcggcctgctggtggatggcttgcatcccagtgctgcgggatatgacgtgctggggaaggaattgagttcgcttctggagaaaatagacggcagatacaagggaggttccgtagttcggtaagacaggaatgggaggatgcgcgtcctgatgttccggcgcggcatggccggctgtcggggcagtggtctttttcttccgggaaaggccgcttcagcatgtggtcttgatgcgtggaagtatttccttaaactgcttttcaattccgtttttccgtcatgaattccctgctgtatacgttcactgcgctgctgggcgccgcctgcctggcgctccccgcattttccgctcctgcggccgcgctgcccgccaccctgaagccggaaccccaccagcgggatccgtatgactggaatgcgcggcatgaagccgtcaagaagcggaaccgggccgtgaagccggaatacgtgatgataggggacagcatcacccatcattggggaggggaaccctccggagacagcaggaaggcgggggaggcctcctgggagaaattgttcggtccccatgcggtgaccaacatgggctttggctttgattacgtggacaatgcctattaccgcgtgcagaacggggagctggccggcatctccccgcgggtcatcattattctgctgggaaccaacaatctgggccaccggaaggatgctccgcaggcctgtgcggacaatatcaaggcatttgtccgcctggtgcatcagaaatgcccctcttccaaaatcctgctgctgggcattctgcccaggagggagaaaaacctggcggagccggtgaagcagacgaacaagctgctcgcaaagctgcagaatggaaaaaacgtcttttttgccgatccggggaaggctctcctttccgcggacggcgtttctccgcgcaatgaattgatgaaggatgtagtgcatcccaacgccaaagggtatgaggtgctggagaaggaactgtccgtacttctgaaaaagctggatgcgaaataccgcggcgggaaatccgcgggcaagcattcctgacggtggtctttttgaggaaggagggaattgtgcttgaaggggaagtcctgtttgaggaaaatgtaccgcctttagtatttgatttatgaaaaacctgttgtttgcgttgtttgccggttccgtctgctgctgttatgcccagcagaacgccgctcccgctccggagcctgaaattgtcgctacgccgccgtccgatgccgggcgcggcctcatccgcgtgaactcccgtgaaatccgccattactccggcacccgcaaggaaccggactacctggtcagcaaggacaacggaaagacctgggaaatgaaggcggctccgagcggttacccgcccaactacggtggcattcccaaggaatccccggcgattgcgcgcaaccccgtgaccagggaattcatccgcgtgcagcccatcggagggttcatcttcctctccaagggaggcctggacggcaagtggtttgcggtcacgaacgacggcaagctggaggaagactggaaaaatccggagaagcagaaaaatctgaaaaaactgggcggcatcatgcgcacgcccacctttgtcaacaagggcaggagggtgatcgtgccgttccataacatgggcggcggcaccaagttccatatttccgacgacggaggcctgacctggcgcgtgtccaaaaatggcgttacctctcccaagcatgaagccaggccgccccaccagggcgtcaggtggttcaacaatgccgtggaagccacagtgctggaaatgaaggacggcaccctgtgggcgctggcccgcacctcccaggaccaggcgtggcaggctttctccaaggatttcggtgaaacatggagcaagccggagccgtcccgtttcttcggaaccctgaccatgaatacgctgggccgcctggatgacggaaccatcgtctccctgtggacgaacacgatggccctgcctgaaaacgccacggcaggcaacggcacgtgggaggacgtgttcaccaaccgtgattcccaccacattgccctttccaatgacgagggcaagacctggtacggattccgggaaatcattctggacgaacaccgcaaccatcccggctatgccaccctggacggtccggaggaccgcggcaagcaccagagtgaaatggtgcagcttgacaagaaccgcatcctgatttccctggggcagcacaaaaaccaccgccgcctggtcattgtggaccgccgctgggtggctgccaaaacgcgttccacgcagacgggcagggacctggacggccagtggaccatccatacctatatcccccagaaaaaaggccattgcagctataaccgcaaaccctccgctgaactggtgcccgacccctctggaggtggaaaaaaagtgctgcaaatcaaacgcctgaatgatccagaactggttaatgagaaatccaatgtggattaccagaacgggggcgccacctggaacttcccgaacgggaccacggggctggtcaagttccgcttccgtgtggcggacggggaccaggcggacgattccggccttcaggtttccctgacggaccgcctgttcaatgcctgtgataccaccacgaaggattacgccctgttcaccttccccatcaagctgaagcccgcgccccatctgctgctgggcatgaaaaaagttccttttgcgcccggcgcgtggcatgaaatttccattctgtggcaggggccgcaggctgtggtctccctggacgggaagaaggccggaacgctgaaaatggccaatcaatctcccaacggagccagttacatccatttcatcagcaccggttccaaaccggatgccggcatcctgctggatacggtgaacgcccgggtgaaataaaaggcgtcctgccgcaggggggcggcaggaactcagcggcctctctttttcggaagcggtgaagcgtttaactccggcaggttcttcaggaccatgtgcagatggtcgtttgaccggttgcctatctgctggaggaccgtgcgcccgtacttgtcacgcagggaagggtctgcctggtggtccagcagcaggcgtgcaatgcccagtttcaggcggtcaagggaatcgtcccccagcagcatgtcacggcagcacagcatgagggccgtttccccggctgcgttttgatggttgacgtccgccccctcgctgatgaaaagattgaccagttccctgatttgggggagatgggatatatcaatgaaagccaattggcggcacaggttcagcagggccgtgtctcccccggaatccggcggagccgtgttcatgggcatggccgcgttgacgtccgccccgtactccagcagggtatgcgcgatttgcagcgcggttttcggggtgttcaggttcagggaaagaaggggaggggtcatctctccgcggaaattgggatcatacccggcttcgcaaagcttgcggaccagaagagggtatccggcagcggcggcccaggtcagcagactggtttttttacccctcaattccggctggagggaaatatccgccccgcatttcagaagaaacagagccgtttcctcatagggcgcccctccgatgccggctacgcaggtcatgacgaggggaggccagcccatcgggcccggtttatccacatccgcgccgttctggatcagcaggttaaggcaggaaagcctgttgtgcaccggcaggggtctggtatcgtccattccgggctggcaggcataagtcaggggtgtatccccctgttcggaccccgggatggagggaagggcctggtgcggcaggatgatctggaggttcgggtccgcgttgcgctgcagaaggcggcccagcaattgcacctctccgagccccgcagccaggtgcagcagggtttcgtgggacgaggtgctgcagcggccgtccgcgctctccgccgtattccggatcatctggagcctttccctgatttcgtcctgcatgtactggcgcatggaaacctcggaaaacatgtgccagtcaatatggcgggaattgggggaaagcccgcggaaaatgaaacgctccgggctgcggtgcgccgtgaaatccgctgcggtaagaatttgctccctttccgcttttgtccagatagggttgaatttccattccgcgggggaagggtcattcctgaggaaccagaaaatggtggagcctgcgacaagagccgcaaaaacgctcaaagctccaagaaaccagagggttttctttcttaaggtcgtgtgtatcataagcaggggaactgcaaaaagccatgatgcaggaatccgtaacttcgggcaatgaaaaaatggtacgcgcaaggaatgcccggagcgaattatatggaaatttaaacggcggattgtgaatccggagggagattttttcctgcctgacatggaaaagaagcccgtggataaagtcatttgcgagggtggcggaaaatatggtgtcatgccccggacgtcatattggacatgggtcttatgatgtggttcatttaattccaattatttgaattatgtccggattcacaatccggtatgatgcgttaggcgttgcggttgtgacgtctgtcttaaaatttctttcatttgctgttgttgccattgaagttaaaaaatgcagggagcaccagttttccgtaaaaacagccggaaaaaaggcggcatttccgttactgtgtgctgaaacgtctcttccgccgcctggcccgtgctgtctgaagccgctcttgccttggaagaaacggcgcatgatgattcaggcaacgttatggactccgtcaaacttattgcgtccgatatggatggaacgctgctcaatggaaagggagaactggaccctgcgtttttctccctctttaaaaaacttgaacaccggggcatccgctttgcggcggccagcgggcgccagtatgacggactgcgccggacctttgcccccgtggcggaccggatgctgttcattgccgaaaacggcgcctatgtggcgtctggttccagagaatggctggtgctggacatggaccgtgaaacggtggccgggctgattgccatgatcaggcgcattgaagggacgtgcattgtccttgcgggcctggactccgcatatattgaagataaacagccggaattcgtccgggaggcccgccggtattacacccgctgcaaggaggtggatgacctgctggacgtgcagggggacaagctgctgaaaatagccgtatatgacttcaagggagcgaaggaaaacagttatccccgcctgaagcatttggagcatggcttccaggtggccgtctccggagaaaaatggatggacatcagccggaagggggccgataagggcgccgccctggagctgattcagcggaaactgggcatttctccggaggaaacgatggtctttggggaccagatgaatgatgcggaaatgatgcggcaggcccggttcagctatgccgtggcgaacgccgtgccggaaatccgtgccatggccgcgtttgaggccccgtccaatcaggaaaacggagtcatgcaggtgctcggaaagttgctggaggtccatgctccgcagggtggggccggggactgctgagccgtccggtccatattgccgggagcagggaaactggtaaaacaagggcatggggcatcctggcgtggctggcaggcttatgttccatgccggtgatggccgtgttcgcctgcgtgggcggcgttttgccgggaactggctttctgctgttcaagctggaggatccccttcttgggattctggcggggtgtctggttctgatggaagcggctggggactgggttctccatttgatgggagcgtaaacccgttgtccgcggcaatgaaggatgcttcctccacgccttcccggcgaagggcttcccggaaatcgtccagcgtttcctggtagccgtcgtccgccagttgccaggtgccgaagtggaaggccatgccctgcctggcgcgcagcgttttaaaggcccggactgcgtcgcgcggcgacagatggacgcctgccatgagttcttccggaagataggacccgatggaaagaagggccaggtccggagagccgaggcggtcccgtatttccgcgaaaaagcgtgtccgggccgtatctccggcaaaataaatgcccggaccgtccgccgcgcgcaggaaaaagcctccccacagggaccggttggcgtctccgtggaatggactgcggccgctgtaatgccgtgcgggggtgaaggtgacggtggtttccccatccccggacggcagggcggcggactgccaccagtccagctcgcggatctgcgcctgtgcgccgcaagggcgcagaagcaggcggcgcagccccagaggaacaagaaagacggggtggaagcgttcctccagccttttcagggtgggcgcgtcaaaatggtcgtaatggtcgtgtgaaaccagtacggcgtccacctgcggcagatcctcccatgcgatacccgcgggccgcttccgtttggggcccatccatgccacggggctcacgcggccggaccagacggggtccgtcagcacgttcaggccgtgcagccggatcaggatggtggcatgattgaccatgacggcctcccattgcccccgttccacgggaacatgaaaggagggaatacgggcgttttccgccacggacggataggggcgcggacggcgcgtgagcatccatttgacgatgctccagtggctgcggtgcggtatcggttccggagagtggaaccgttgcgccgcccgtttttctaaggaaaatgtgcggcagagccgtgactggaggaaggaatgcagggacatggggaacgcggtccatcataacggttccggttccgggaggaaacgggcgcccccgtcagcatgaaagccgccgccctttttagttttgcttttccggggcgtatatggtacatccgtgccagacgtcatgaatcaggaattcttttcagtgcttgtgcaagtggtggcagccctggggctggccggcattatcttgttgctcagtatcttgatgggcaagcgctcctccgtgcgcaagcctgcggacattccctacgaatgcgggatgattcccatgggggaaggcgctcccatgttctccgtgaaattctacatggtggccatgctcttcgtcatttttgacctggaagtggtattcctctatccctgggccgtcaacttccgggactatgtgatgatgaatccggaatccttcacggccatgtgcatcttcatcggcattctgctggtggcctacctgtacgcgctgggcaagggggccctgaactggcaccacgatccccgctgacccttccttattccatttcatcaaacgccgtgctccgtcgggaacgcggcgtttttcatggggaagagaggggacaaccctgggaaatcctatggcggggaaaaatccccttaaggcttattccttgcctctatgtctcttttgcggataaattcttattgtatgaaagatgatttctcttgccagggaaagggaatggggatagcgtctgcgtgaccaggaaatccagcatgaatctgcctcttcccaaaacgacgcagggagtctaccgcctgtcggtcagcaccttctattttctccagggcctggtattcgccagttgggcgtgccgtattccggacatcaagaatgcgctgggactgaatgacgccgaccttggctccgtgctctttgccgttccggtggggcaaatgtccgccatggcgctgtccggctatctggtgggccgttgcggcagccggaggatactgatagcggcttccatcttttatcccgccgtgcttgtgtatctgggcatggcgtcctccttctgggaactggcggcggggctgtttttcttcggggtggccgctaatttgacgaatatctccgtcaacacgcagggcgtgggagtggagcggctgtaccagtgcagcatcatggcccggttccatggcttgtggagcctggcgggattcttcggcgccctgctgggggcggtgatggtggactggaaggtatccacggaaatgcacttcatcgccattttcctgatgtgcatggtcattctggccgtcttttccccctccctcctgccgcgggatgcacgccgctcctccacccagggcggaggcatgttccggagcatggatgcctatgtcttggtgatcggactgatcgccttcggaagcatggtgagcgagggaaccatgtttgactggagcggcgtgtactttgaaagcgtggtgcagcccggtcccggactggtgcagatgggctacgtggcgttcatgagcaccatggccctgggacgctttacggcggaccgcatggtgatgcgcttcggccccgtgcgcgtgctgcgcgccagcggcattctcattgcctccgggctgctggtctccgtcctgttccccatgctgtggtccgccacgctgggcttcctgctggtgggcttcggaacctcctccatcgttcccctttgctacagcatggccggaaaatccaaaaaaatgataccaagcgtagccctggcctccgtctccaccatcggctttctgggcttcctgctggggcctccggtcatcggccacattgcccatgctttctccctccggtggtccttctccctcattgccctggtggggctgggcacggcgttcatcgcccccttcctgaaaaagttcaggtaaacttccggaaaagggaatgagcgcgggcatgcgggtacgtcattaagagcaacctatgcagcccttattatctattccaaagttatctacaggcaattcttctatttctatgatgttgtttatgagaatatcgcattccggcaattttttgatttccacttcatatagattgttgctgccgaggtgggcatagactacatagattttacggggatcgggtgaatagtctggattatccgggtaaagagactggatagcttgataaatatcagttggtgtgagggttccgcaattggcgtgatgaacatgggcgcatgcttgagcgtgtatgtctgtcgatgtgtagatgaccgaaacgcacgatctcaggccgacggaggacaatactgccggattggcgtcaaatgttaacaagcctttataattggtaatcagcggtttggtttttactctccgccttctgggaataaatggagccgggccctgatagcggccgggagacagttgtgaccgtattgttgggggtgtggtatgaaatttccgatattaacgggttctattttttcttgggtatggtattcatgattatttttttgtgttgataataaggattttaaattaatttttaagcaggattttttgaatattctctttgccgggtgcacgaattgacttccaaatgtacggacagggcaggcgagtgcgaagggcggccgccggcttttctgttgggagccgtcagccgggtacttcttgtcattactgcggagtaattcatccaatcgccttacctgatggtgacaagcgtagataatgatgaataaggcactggattgttgttttacatggcggccaaatacccgtgcatgatgtagttggcatggcggaaataccttgtcaaataggggcgaaagcggcttgaaagggtccaatttttcatcataaacaaaaaccccccttcaagttgtttacttaaggaggggcataaatggtgcgcctggcaggactcgaacctgtacgcctttcggcaccagatcctaagtctggcgcgtctaccaatttcgccacaggcgcgacgaatgcgtgggcgcactctgccataccgcgccctggcgttcaagattaaacgggggagctttgtctttgacatgccccagggcagcccgtatggtggcggcctatgaaaatgttaattaccctgttgagtgtctgtcttctggccgcgtccccccattcacgggcggatgtcaggctgcccaaaagcactttcaccacggaccgaatggaagaggctctgaaaacagcgaaagagcaaaagaagcccgtggcctatctttatacgaacacggccacgacctgcccgctggccgccggcgtgacggagggatttcttgaagccgtgggaaaacggtgcgtgctggtttatctcccggtgaagggaggcaagtccacggtggccgctcccgtgaaggaggccctggaaaagggcaagttttatcccaagctggtgctgactgccagcgacggctccggggcgcagtgctttacgtatgaggcctaccaggcggattccaaaaaagcggcgcgcgagatcaagaggcagattattgccctggctaaaaagcagtcctgaaccggaggacggaacattccgggcgttccgcagggcagttcagcccatgatttgcgccggaaaggggaatattttcacaaacaggaaatccagcattcccacgcacagggcgatgcagatggcctttttgggcgacaggcggggagccgtcttcagccagatgacgattcccgcgtggaccgccagggagatgcccacggaccaccagaagaacggaatgcccgtcatggcaaagagcgccgccagcggataggtgaacgccaggaagattttcatgatggcttcccattcatgtccgcgcaccatcatcagttgcttggatagaagggagacgtacaggcaggaggggaccacgacgcacaggatgagggagacgaaccctttttttgcataccgttcttcctgcgtgggaatgtacatgccgcatatactgggtcagcaggggggaattgtcaaacattgtcctagcccggcggggcggggggattatactggcttcctcgcgtatgtcgtcttttgaattaaattcctccttcaagccctccggggaccaggagcaggccatcggcaagctgctcaagtctctggaggcgggcaacaagcaccagggcctgctgggggtgaccgggagcggcaagacgttcacgatggcgaatctgatcgcccggatgaacaggcccacgctggtgatttcccacaacaagacgctcgccgcgcagcttcactcggagctgaaaagctttttcccgaataacgcggtggattactacgtttcctatttcgactattaccagccggaggcgtacatcgccagttccgacacttatatcgagaaggattccgccatcaatgacgagctggaccgcctgagcctgaacgccatgaattccctgatgacgcgccgggacgtgattgtggtggcgtccgtctcctgcatttacggcctgtccaccccggaagattaccgtaacctgaccctgcgcattcgtgagggagacatcatggaccgggacgtgttcctccggcagctggtggaacgcctgtttgagcggcaggattttgattttacccgcggcacgttccgcgtgcgcggggaggtggtggaggtgtttcccgcctattcggaaggggaggcgatccgcgtggagtttttcggagacgaggtggaacgggtttccctgattgattccacctccggccgcgtgcgggaacggctggggagttacacctttttcccggccaagcagtacgtggccgctccggaaaaacgggccgcggcgcttaaggccatccgggcggagctggaggaccgcgtgggatggtttgagaagcatgggcgtcttttggaagcgcagcgcctgaaactgcgtacggattacgatctggagctgattgaagaactgggcttctgcaaggggattgagaattattcccgccatctttccggccgcctgccgggcagttccccctccacgctgctggatttcttccccaaggattccctgaccctgattgatgaaagccatgtggccgtgccccagctgggcggcatgtacgagggggaccgcagccgcaagaatattctggtggagcatggcttccgcctgcccagcgcgctggacaacaggccgttgaaattccatgagttcatggagaggcagaaccagatcgtgtacgcctccgctacgccggggccgtttgagctggtgaactgccgtgcggacaacaagacttatattcccgtgcgccgtgccgccaggtccggggaaaaggcgccggaaggcttcaaggggattctgttcacttcccccaaggatatccgcgtcactcccagcccgtctacggaaccggtggagaagtttgatcccacgaagcgttccacacccctgattgtggagcagattatccgtcccaccggcctgctggagccgaagatcaccatccgtcccctgaaagggcagattgacgagacgattgccctgtgcaacgagcgcgttgccaagaatgaacgcgtgctggtcacgacgctgaccaagaagacggcggaagacctgacggagtacctgaagggggtggggctgaaggtttcctacattcatgcggatgtggacgcgattgagcgcgtggagattctgcgcgccctgcgtgcccggaggatagacgttctggtgggcatcaacctgctcagggaggggctggatttgccggaagtctccctggtgtgcattctggatgcggacaaggaaggtttcctgcgcaatgaaacgtccctggtgcagacggcgggccgcgccgcgcgccatttgaacggggagtgcgtcctgtttgcggatgtaatgacggattccatcaagcggctgattgagctgacggattaccgccggggcattcaggagaagtacaacctggagcacggcattgttccccagacggtgagccggtccgaacaggggcagttgaaactgtatgcggaagaggatgaagagtccttccgcgtgacggaggacgaggccgggtacgggctggaagagcgcattgccaggttggaggcggaaatgaaggaggcggcctcccatctggaatttgaacgcgccgccctgatccgggatgaaatcaggcaaatgcgcgaaggcggtaaaaaagagcagggcattccttgaagaatgcctcttttcccctccggaacgggaaagcccggatgttccagaccgggacggaggcaatgacgccatttttccgggatcatcgtgccgatgattgattttcaagcgtttttcccgggagaaatgttccgcggcaatcgctgccaaaaacggggaacccttttacggagaaggcatgggaggttgccgcatttcaaaaaacgaattgctaatccggggtcaaggcctgttttttataacaagggacttatgctgaatagccatgtccttattgagaaacgttcccttgtggtgaaaccttccggaattgcatgaccggcctttggagcggcgcaagcctttgcagccgttgaaaagcaggtgtctcgctacgattccctgactttcagggaaaaaagttttctgccgttcctgttgatgtccggatgccgcaaggcttgcggcgctccctgtggcatggagtccattccgtgctaatccgtaacggattagcaatccgttagtttatccgtccaggcgccggagcggcactgggttcattgactgtgacggaatgatgtttggcgtattctttttcttcgtgattctagcttctctgcttgttttatggcgctggcgtgcggatgactgcatgctgccgtggaagaaggtggtggctgcctgcggaatttgcagtgtcattcttttccccctgggtctcgtgttccgtgcggatggcctgtgtttcggaacctgggagggcgccgcatcctctattgtccagtatggaatttttttaatggctttatgcctgtccgtacaggcgttgaatggcgtggtatggtatggcgcgcgccatgaaacggagtggagcccctgggggaaatggggcgtcatggccgttatttccatcgccgtgctggcgtggtggtggcatgcgggttcacagtgttcctttgatttccaatatcgccagtatccccagatcgtcagcggacagtataatttgatgcatacgctggcccacaccctgctgtgcaagggtgttttaagcgtctggccggaatttcaggccatcgttctggttcaactggggctgctgttgtccgtttgcttcatgatcgtttcctgggcggcgcgtgaacggatgcgggcgctgatcgtgctgggagccgtcttgctgtgcctgttccagtttgagatggtgacgacggtgatcaaggacgttccctattccattttcctgatggcgcttacggtgggattatgctcctggttattggaaaaacgcacctccgccctgtggctgatcggtcttgggctggccggaaccgggagcctgcgctatgacggagccgttccgttttttcttactgtcgcggccctgtccgtccatatgttccatcaccgtgaggaattccgccgcctggcgattcccgtgatagggggaatttgctgctggctgttcgcttttctcgtccttccctttctgatggatgcggaaagcggcgcgtccggcaccaagtatgccaagatggctcatgtggtctgtgatattgttgcagagggcgggaaggtgagtgacggagacatggagctgattgaacgggaaatcatgcctagggacgtcatcatgaggcagtaccgcctttatgaagattccctgcatcccgcagtgtcagccgggtacgggcagaagtatctccacacgggcctgtttgagtcctgggagacgggaatgaagtatgggtttgcgtggaccttgtccggcaaaggggaacttgtcaggaatctgtttttctccgtttctgcggacaatcccctgctggcggggaagattcttcttctgaacagccagatggtttggaacctgcctgcgggcaatgtcagggatatgccgcagctttccctgttttacggctgcgtgctcagcttcctcgtttacggaatgatgaagaaaaaggcgtatctgatcccttttgtgccattttacggagtggttctggccattggcgcggcggcgactacgtatgaagtccgctatatgctgcctctggaattgctgttccccgtcctgctgctttattccatctcctgcgccaaaagagcggatgtcccgaaggagggagagaaaaaggaaggccgcctttcctccggaatttgagcgtgccgcactggtccgggagggggaccgggcaggtggggaagcgtgccattttaaccggaaaaatgtttcggggtcattttccacttgccaagagcggattggcgcctatactccttccaccatgacccgcaaaggtggtatcaataaaactcgcaaggcagtcgccaagcgtttcaaggttaccggcacgggcaaggtactgcgccgtaaacagggtaagcgccacatcctccagaagaaatccagcaagcgcaagcgtcagcttggcaaggtggctctggtggacgaaacgcaagtctgggcagtcaagcagaacctgcctttcgcctaaaccgcggaaacgctcgaccaacgccgagctttccccccgctgaacggggggccttcatgcagccttcttccaatgagaagataagaacaggcgagactgcagggaggtgaggaagaacagtctgttcaagatagaaatagaaataagctatgccacgtgccactaatggaccggcctctcgcaagcgccgtaagcgcattctcttgcgtgccaagggtttccgcggtttccgcagcaaactcttccgctacgccaaggatgctgtttacaaggcttggcagtatgaataccgcgaccgcaagagacgcaagggacaattccgccgtctctggatcgcccgtatttccgctgccgtccgcgaccgcggtctgacctattcccgctttatggaaggcctgaaagccgccaacgttgatctggaccgcaaggttcttgccgacctggccgtctccgacgaaaaggcttttgacgccatcttcgcccaagcgaagaaagccattgaagccaaggatggtgccgctctccgcgcctaagacgcagcagagtccatctgttcagtaaacattaacaaacagccccggaggttagccttccggggctgttttgcgtcttcatgtccgggtgcggaaaaaaacgtgaaatcccgccaggggaggattcgtttattcggattcggccgttgcctccttttccttttccgcgctggccagctcctccaccttccgcaccagtccatccatgctgccggaagcgattttgttcccgttggcgtccaccagcaccagggaggggatgggaccgggataattcttgcggatcagagggctttccttggaaaggttgtccaggtagccgaacaggaagaccggccacggcatcttattggaaacggcccatttctgggcgccttccagcgcatggtccatgctgcacaggactacttccagatccttgcggggagcgattttatcccggtacacctccaggttgcgcggaagggaggccctgcacgggccgcaccagctcgcggaataatacaggataaaatacctggcgttccatttgccgtccattttgacgaacttgccgtccttttcccggtaggtcagccctttcagctgtttgcccaggactcctttcgggatgaccattttagccagctctgcatccgtcttgccgaccagctccttgtggaagtcaatccagtccaggtcctccctggaaagttttttgaggggaaaggggattttctttttcgtgaagacgttctgcatgatcgcgttgacgctgttcaagccggccagcctagcctggaaggtggcgcccgtttccttgttcgtccaggtccgggtcatggaggggatgtccgcttcttcctgaggcgcggcgtgaagaaagggcgtacaggctatcaatgcggctgccggaatgcccgtcatgagaaacttggagacaatcatctttcgttgttatggtgttttctgccgcatgtccagaatttaaatgttccctctgtcattaggacatccttgaagcttgtccgccgggaggcgtcatgataacctgacccacaaagcactaccatggatagcattctttccgttcttaccaccattgccattatcttcggtgtggtgatgttgtttaacttcatgattttcattcatgaactgggtcactttttcgccgcccgctggcgcggcctgtacgtggacaggttccaaatctggtttggacgccccatctggaaaaagaccgtcaacggcgtgcaatggggggtgggctggattccggccggcggcttcgtttccctgccgcagatggctccgatggaggctattgaagggagagcagagcttcccaaggatttgaagcccgttacccccttggacaagatcatcgtggccgccgccggccccatcgcctctttcctgctggccgtgttttttgccgtggccgtctggatggtgggcaagcctgatgtggagatgggggtgactacggtcggctttgttgctccggacagccctgcggcccagtccggcattctgcccggcgacaggattgtgaaggtggacggccgcccggtggacaagtgggcgggcaatatggaaggcgtccgggaactgattatgctgggtgagcatgaccaggtagtttttacggtgcagaggcctgggcatgaaggagagatggaaatttcctgcgggttccggattccggaaacgtcctggtggcagcgctccggcatgcgccaggtagggctgatgcaggcgatgccctgcgtcatcggggaagtgcttcccaattctcctgccgaccaggccggattgaagccgggcgacgtggtgacggctgccaacggggaacgcatctggagccctgcggcgctggatgggctgttgaagaagaatgaaccgcttctgctggacgtgacgggcaaggatggcgccgcgaggcaggtgaacatccagggcaggcttccggagaactggcacaacggcgcgaacggctccctgctcaagggcgcccagcccattctgggcgtaacctgggacctcagctccgtgggccgtgacgtaactgtgcatcctactccgtgggcgcagatcaagcagagtttgaaatggatgggagataccctggcgaaggtggtggcccccggcagcagcgtgggcgtggagcacctctccggccccgtgggaattgccaaccagttttacaagatgttctccctggaggaaggctggaagctggccctgtggttctccgtggtgctgaacgtgaacttggctatcctgaacatcctgcctcttcctgtggtggacggcggccacgtggtgatgaactccattgagctggttttccgccgccccctgaacgtgaaagtgctggaattcgtgcagttcggcttcgtcttcctgctgatgggcttcttcctgttcgtgacattcaaggacgtgggggatttctttggcaagaagccggacaagctgcccaccccggtattcaaggccgtgacggattaaacgcgggcggcgacccttgatacggcttgattccatgaagcagtcactggcggcgcgtttcctgttccgggcggtggtgctggcgcttctcgtgtacgccatgctgctcacctggtggacccccttcaccggggacagcttcatgcattccgtattcggggctggccaccgtcttgccttccagcccgtgctggaacggtgctggtggtcgtacatgaactggaatccccgcctgggggaattcctggctgtctttacggccacggcggggaagtggcttttcctggccgtcaatcccttcgtgattctttccctggccctgatgatgttttacctggcgcggggaaggagggtgaattccgggcactggcgggatgttctgctgttttctgtgggcgcccttcttctgctcacgtcttcatccaggccgggcatcacgatgttctggctgtccggagggacaaactatgcgtggtcagccgccgtctggctgggcttcctgtgcctgtaccgcggcttatgggccgggacctcccggattaaggacaggcccttttcctggctttggataggcgtggcggcttttgccgccgggatgaccaacgagaaccagattcccgcttccctgggcatgctgttcctgtactggctgtatgcgcgttggaagagcctggctcttccccgctggttcttcgtcggctggggttttcatgccctgggtggcgcctgccttctgctggctccgggaaacggcgtgcgtcttcattcggagacggcgggtggcgccgccgtccttcactcctgggcggagcgtttcggcgccattccggaactgatgaatgctttttacgagttcatgccgcttcctaaaatcctgctggcagccgtcgccgtggccctgaccctgctgacgtggagaagaggttggaagacttggaagggggcttctctccgccgcatgtgcgtttcccttctgttcattctggtggcccatgccatggcaatcagcttttttgtgcgcgtgattcccgcttggcatgccatgttttccgctacggtgctgatgatgacgggcatcctgggactgtacggggtatggatggacgccgcgcagaggcgttggattccttcctgcgtgctgcttgcggcggccgggctggccctgtgggtatgctccgggtatctggatgccttcccgcgcatccaccgccagtgcgaggaacggaaaatgttcatccgccatgaactggaaaagggagagagaaacattgcggtccctccttatgagcccgtgcctctggctccctatgtttccgtgatgtggcgcatgagcagcggagacccggatgaatttatcaaccgttccattgcccgttatctgggaattgaaagcatccgggtggctgtgcctgaacattgaccgtcttttttggcgaatagctgttttcccggcgcggccgtattccggtggaaacggcggcgcggtaaaagtccggctgtttttataaaccgccctccggccatcttttctttactcgaatgccggtggaacaggaatgctcttgcggatcaataatccgatgattgcataaaatctttaattaatattaaatctatttatattaaatacattatatatatttatatcttgatatgaatccctcaatacatggaaaacaaaaaagatatattatttaatttttagtgttttccattgacatcggattattgatccggtttactttgtgtcaccatgaagaagtccttgttttctctggctctgatttcaagttccctgctggcagtgcaggcggcgactgtgcaaattgacttcgggcgcgatgacgccgcgacagacggagccctcaatatgaattacggccattcctccgcagccctgggcacgatgccgggcgacgtcactttgggatggagcacggccggataccctgtgggggatgacggccataccacgaccaagacgcccggcgaagaaaacgggtggaagaacgcttttggcggcagcatgcctttctccctgggagacagcttccgggacggccttttaacgcagacggcgaccggttccggttcttttaccgtgactttcagcggtcttgccgccggggaatataccttgtcccttttcggcggtttcacgggtaaggacgtctttgccggacagacgtggacgatcggaggcgccgacgcttccaacgcgacctggacaaactttggcacaaacgccagcggtgattggaacgagctttccacgacgacgggcgacagttccggcgttctggctcccgggaatgccgcagacggctccaatccttccgccaacaagggcctttattccacggtggagcacatcgtggtgggggaagacgggacgcttactctcacgattcagggggacggttccagcaattttggccgtacggccctcaattacctttccctgacccaggttccggaacctgctacggctactttgagcctgctgggcctggccgctctgtgcctgcgccgccgccgcgcctgaccaggaaggttccaaccgtttttattcaaagctgttccgcgtccgcgcgggacggcttttttatttaacggcctttccctttccgcgccttcggggcggcatgttttccagccgcggcaacggttttttccataggggcattatccgtcgttaacataggaacgcagggaggaacggcaaggaaaatgcggggaaagacaactgccggtccttcaggaaaaaaattcctttaaatgcggatggtttccttcaaatgggtggaaacaatgatgcacgcgattcgttccggcggtattcccgtgattctggacacgatgcgggcgtaggcgttcaactggttggagtggcgttcccgcaattgctccggagagttcgcatggtccgtcttgaagtccacgatgcaggcgcttccgtcatgaaggagcagcctgtcaatcacgccggagatccaactgttcccgtcaatggcttcaatgcgctgttccttcatgatgcgtgccgttccgggaggggtgaagagttcgcggatggagggaatctccatgcaggcggccaccgtgcgttccgcctccgtggcgggatgaagagcccattccggcttgtccgattcatcccagcgggtaatccgttcaaagacggcgtgaacggctgaaccgaatgcggcggattccgcatcgtcggcatatcttccttcgtgggccgcgtcttctgccgccggcaggccggagggggaaagccgctccctgaccatcggccgttggaggggccattccggcgtgtcttcctccgcccgttcccgtacggattccgtgaattctccgtaccacccgccatggccgcaggaatacaggcattccgccccggattccggaagcgtgtcttccgttcctttttcacaggaccgggctgcggaacggacgaccttccacatggaatccgcggtcatttcacctttttcttcccggtaggggagaatgacgtacgtggcccgcttggcgcgggtgagcgccacgtacagcttgcagaagccgtcaaactgctgctgggcgcgccattcccggtaaagctcctggagctgtggaacgttcgtgtaaacgtgcctggaagggaccagcacgattccttctatgctgccctcccggttctttttgacaaagtgggtcaggtgccttccgtctgcaaagggggcgtccctgccgatctggggcaggatgacgatgtcgaatcccaggcccttggatttgtggatggtcatgatccggacgatgcccccggcaggatcctcccggcgggtcacgtcttccatgtgcctgatccattcatccagggaaacgcccttctcgtccacctgttccgcctcattcttccagacggccaggcggtcccggtggaattcggtcagttccgttcccgtccgggccagcctccgctccagttcctccatgacggcggcgtagccgtcccgttccagcaggaggcgccaggccttccagtccatgccttcaggccgttccggagtgacgaggggccggaggggggaatgggtgagcaggcctgcggcaaaggggtctcccggcatgagcagccagcggaagaagtacagcaggttttttcccaggggggaatccacgcccaccggaacgtcgtcgcatacctccgcgggaacgccgtggtccgtcagccaggtcttgatggctagcgcctggtttttcgtgctgaccagaatggcggtttccaggccgcggcgcagggctccggtacgttccaggatgtcggctgccgcctggcacaccaggtcgttggcggtggaggattccgccttgggcgtctgccagatttgggagacgccggaccggccttccagatggggggcgcaccggtgctccggatattccccccattgttccagggcggcgggttcgcagtccggcgccgtccgggcgtagtcgcagatgtcgttcaccaggtccagcacgggctggacggaacggtaggaggtggacatgccgcgttcttccagttgaagctgggtggaaacggagcggaaaagctccggatccccgccgcgccactggtacacgctctgcttgatgtcccccaccacgaagatgctgccttcgctcccggccttggattccgtcaggtcgtccagaaaaggcttgatgacgcgccactgggactgggacgtgtcctggaattcatccagcatccaatggtcatagcggcagtacatgcggtattgcaggtctctcttgagctccggcgtgacggctcccccgcccagcatgcgcgtgacgtcgtgaaacaggaaccttcccttgttgcggaccagggaggagtatttgccttcaaaaaggagcatcagtccgtgcgtggcgcgggtgcggcgcagcgcctgcaggacctccatgcgcagccagctctggatgagttcttccagcggaggggaccagaagtccttgaatttttcccgcgcctcttccacggtgatgttccaggaagaacctccgtccgtgcggaagcgcacgcggcccagcctggcgtattgggagaaaccgttcaggaagcgcaggaacagttctttgtttttggagccgtttttcccttccggagcgggcgcctgctgtgcctggaaagccacggcatgcaggacggcgtcaaattgttccaggggaacggggggggccagttcttccggcgtgaagcccagcgcgacggggtttccccatgttccggcgtccggttcgtccaggaaaagttcgtggtaggtgttgagacgccgcatcatggaatcctccgcatccgcggcttccgcatcggagtccgctccggagaggaaggcgtcttcaaaattccgcctccgctccctgttcacggagcattcccggtacagggaaagcagggcttcgcggcgcgccagcttctccgccgtggtgtcaatcatgctgaagccgctgacgcccagctcaaaggtgctggtggaggcaatctgggcaaaaaggctgtcaatggtgcagaggttgaggcgcgccaggttctgcaccaggatgtgcagcagatgccggaaacgctcccggtgcaggttttccgccttccatgcctccgttgctccgggccagatgccgggttcccccggtgttcccttgatgaccgtccagagctgttctttcaggcgttgcgccccctcctcgtccgtagcccccgcagccaggtccgtcaggatgcggtccttgaattcccctgccgccttccgggtgaaggtgatggcgatgagccgttcggggtggctgccgtggttcagagccagcagccccaggaagcgcagggaaagctggtaggtttttcccgttccggcggatgcggagatcagcatgttggtcagggagaacatctcagaaaggcaggtggggggtgaggttgaggcccagcaggtcctgcaggctttcacgccgggaggccatcaggtccttgaacacgtcgtaggagggagggttccagcccagttcctccgcggtgatgagcccgcggccctcatgaaggagcttcatcagctccaccgtccaggcgcgcgcgctgtccagcgcgcattcctcatagccgggcatggggtcgtgaagcgtgtcccaggcagagatgccgatgtccagcggattggcgggaagggcgtaatacgccgccgaagggtggccgccataggcttccgcggcccacagcacgtaaacgggcagttgcaggtctttccagcgcgcgtgcgccagccttccgtttttctggcgtttggtgtagggccgcagggccggggaaagcagggacagggcgtccgggcgcccgatcggttccagatgctttctttcacaggatgcggctgctcccgttttgtagtcaatgacccgtatgcggccgtccgcgtggcggtcgatgcggtcaatgcggaatttcatggggaagccgcccagggaccagtcttccacctggtgctcaaaggcgatgcaggaccagccttcctgaaggtcctgcaaatgctggacggcgtaaacggaaagcctctgctccatggagcgtttttgcagcagcaggggcatgaggggcgtggggccgtattgtttccggaaggtttgttccagtatttccgtgatggcgtcctgaagggcggcggcttccatgccgtctttcagggcggcgtgttcccggcagaagcattccagcacatcgtgcagcatggtgcccagttcgttgacggccatgtcctccttgtccggcaggaactcctcctcattcatgtgcagggcctcccgcatccagaagcgcatggggcacgccaggaaccttttgaggacggaaggggagaaggccagccctttttccttccacgggtttttgtagccgggcgccatcgcgccgatgtccgtggcggccttccagccttctgcgggctgaaggtaccagcttccgcgctggtaggggaggggtgcgggcggatcgctgatttcccggaaaagctgttccacgcggtgcggcagttccgcgtccgggcagcgcatgagcagggaggaaggcgtcagcggatcgtttttgctgctggtccgggagagaatgatggtgaggctgccctcccgttcccgtgaatggagcagggcggtcagcaggaagctgtcccgggcttttttccggttgaaggaatcgatgcctagggcttccctcagttcctccggcatgaactggtcggaaacgccgccttccggtacggtcccctcgttcaatcccgtcagaataaggtgtttctccgggcggaagtggacttccatccagcccagggaatccagtaccgcgtgggccttccttctgtttttgacgcgcagcggctgaaggcatttcatcaggagctggagggccgtctccggtctggagaaggcggtggagcgttgctgaaggcgtatgaggccggaaaggcaggaatggagcatttccatggcttccgtttccggaccgtaggcgttcgccagagccgggaaccattccatcagcctttcccccagcgtgccgggttccgccatccggttccgccaggccagaatggcctggatggaagggagggcggccggataaaattccttcagcctggaaatcaggtaatcttccgattccggaaggaacttctgctggattttatccagcgcggcgcagcagtactgctggttgcctattcccagggaggcgcagagcagggaggaacgcgccaggcagaagacgggccgcgccgcgcccttttcttccagcgcctgccgcaggtggcggagcaggtccatgacgccggttccggcaaagggtttcccttccggattgtggaggccccagccgtattcccgcagggcggcatccagggctacgttcatgtccggatcacaaacgcccagggcgacgtccggcgttgttccctccgctgtgcgggcgaccatgcggcacgtttccccggccagccgggcagggttggccgtgatcctgatctgggcgtcgctgatatggatggggcactgggtccagacttccggaagggggcatccccaggagtcaaaggaaccggcttcctcttccggcgcgtgtatccatatctggacgggcacgccgctgcgttccgcatgctggagggcctggcgcaggggacgcggaacgtccgctacgcaggccaggatgacgtgccctcctgtttcccgcagggaatggagcagatgcggcggtgcttccgcctccatggcggttctgtccgcaagctgccagcctttcaactgttgcgtgcagtactccgacaacctgtccatgtccgtccagcgttcgtcacggcccgcgcaggaatcctgggccatgccgcaggaaatgccctggttcgccatggcgtgtttaaggctttgcaggctgcccgccatttccagcatgctggaaaaatcctccggcatgtgccgggggaacaggcgcggataaagacggtggggagaggttcccagcgcctggagccagccggccagctcttccaggacggaagccgtttcctccttttcctccagccgggggaactggtccgccggaataacctggggggcgaagatggcctgtgcgctggaaatggaggcaaggtattccctcaattgcctgccggattcccgtgtggggaccagcaccagattccggtggaagtcgtttcccagggaaagcagccgctccgctacagcccggcaggccggtttgtcccaggatagaaagagtcggttcatggcagggaagcaggactccccggaaaggggaaaaggcggagactacgggcgtattataccttgccggggcgtattttcccatctattttttcagggctgccgggagggggatgggagatcacggagtgtcaggggctttagtggcgttttagctttgagggagggatgcctttttttgtatccgcggatttttgcctgggaaggaaggcttccggtttttggacgggagcttttccgccccttcgtggaggggaattttctcttgctgtgttccgcccggcgtccgtagggaccgggaggaccttcttcccagaagggagttcaccaagtggctttttcgggaatgccccgcctccctaaacaagtgtgttcattcctgcgtggctgtagaaggccgttttctgaagttcccgattatttacggctcctgaacggcggtcttttttccggttctggtgaccagaagcacgcccgtgaaaaccagcaggacggaaagggttttcatccagccgaagtggtccatcccccacagcaccgctacggaagaggcaatcaccggctggcagtagttgtacatgctgaccgcggtgggtttcagccgctgctgtgcgaaggacaggcagatgtagcttacaaaggtagcgaatgccaccacgtaggcaatgcccagccacgtttgcatgggaagtgcggaataacggatggaaaccacgtcccggaaggtgaagggcaggcaggcgatggcggcgtaggtgaacatccatttcatcagggtgacgggcgagtatctgccgatcaggtttttaaagaagacgaagtaaacggctacgctgcactgggaggccaggcaaaggatgtcccccagcaggttgttgtctcccggcagggccgccgcacgccctccgctgccggaaaccagcagaatggctccgatggcgctggcgcagaccccgatgattttttttcccgtgatcatttcccggaggacgaaggccgccagaatcatggtcagtaccggcgtaatggtggtgatgatggccgcatccgccggagaggtgaatcccacgcccaccgtgaaggccatctggttgaaaatgatgccgaacagggaggcgtaaaacagggtcagccggtccttccttgcaatggtttccccgggcacgaaggcggaggccagccagaacaggatggccgctcccagcaggcggaaggtagccagggaagcggagctgacttcccccggctgcatgaccagtttgctgaccggagacatgaggccccagataatggccgccgctcccatcgcgatatgtcccttcagggttccggattccatggtacggcccgctgcgcagcgggcaacgcattctccgcttccgcggacggattgcaagagtttttagcgcggaaccgcagccccggagagaacggccaggcggggagaggggcatgctcatccggggaattgggaaggtatggctctccggttttttccccctgacgccgggcaggtccggtttccgtcttcatttgattttaacgggaaaatgattgacccgccgttcgtccaaaattgcatcggctcctatggggcgggagtggcggtattgcccgctttccgcctcaactccatgcggcaggatttgaggcggaacaggaataagaagaccctggctgaagtcctgttcctttacggggacgctgatgcaggcgtttttatcggggtccctgcgggtggccgggcttctattcggcaggcatggagatgccgattttgtgttccttgctgttgccgcggagttccggcgcgtacatggcctcaatgacggccggcagggcgctgaagcgtcccgggcgttccgcgcgcaggcggtggctgatctggtattgtcccatgggcagggaggaaaggaagacgcgtatttcttcatcccctatttccttgtagccggatacggtccccatccaggcgtagccgctggtggtttcctgtgattcgcatcccgcgggcttggggtccaggagcatgaggtattccacgtcgttcttcgttttcacggtcatcaccacttcaatgatgtcgccgctggcgatgacgtctccgtctttcaacagcgtgcggcgggtcaggtccttgccctgggagacgagctctccggcatccgtctgggtgtccttcacggagtcgtccttcaccgtttccttccggatgcagtagtaggagcgttccacggtgacggcattccccgcggcgggaatggggtcttccagggagaagtagctgagggtggaattggcataaatgtttccgctgcccttcttcctgcggatggtgatgacgtggctgccgtccgccaggtctttcccgctcatgcggaaggcgttgtcaaaggtgaacagggtctccttcgtactggcgaccgttttgaccggaacgccgtcgtaaaggatttccgcttccatgtcctccatgccttccctggtctggagaaggtaggcggacagggcttccagacaatccgccgtatccttggtggagtcccagtaggaaccgttggcgcggttgttgagcagccatttggccaggcgcgccgtgacgggattgccggggtcgctcttggccatcagtttcaggtaggcggcctgcgtggctacgccgctgccgtaccaccgccaccagtagccttcattgggaaggcgcagccatgcggtttgcagggagtcgtcctgctggaggaactgggaaatgatgggcattaccttcttgaagtcgtccatgcggtgggcgtccagcaggatttccgccagttgaacctggctgatgacgggaagttccagcctgtcgcggaacaggtagcgttccatgggcaggtttttgacgccgcattccgccagaacggaataaacgagggtgtccgtggcggagaccgtcaggcggtaatcccccagcttgcggatggcttccttcttcttcgggccgtccggcagtttttccagtttccggtattcgtctcctttctcaagaagagcggcctggctttcctgatagtttttcagccagcggacggctccggaaagcatcccatccgggacattgaccgtgtttgaagcaatcttcaagccgtgcgccacatgggccgtcatgacggggtctccctcgctggctcctccgaaccatccccaggaaccgttggagagctgcttctcccggagggaggagattcccttggcggccatcttcttcagcgcggcttcatcataaacggggttgcgttccagcttcttcatgatgctgtcatggaaggccttgttcttgatggcctggggattcagattacggtggctttccagcgccgcgccaggattcagaccgagctgcttgagcgcgtccgtcacgacgagagcgggcaggaagcggttgagcgtctgttccacgcagccataggggtattccgccaggtagggcagggcttccaccatgctgagggcgatgctgggggaaaccttgacgaccagctcgctttcctccctgcgccgctgctgcggcagggaaatggagagtttctgctcctgttctccgggaagcaccacggcgctccccgcatggagctgcttcatgccgtgcaccagcacggggaagttcatctgcatggcgtctccggtggagccggacgccgcctccatggcgacggcggcggttccctccctgatggcggcggtccaccagttgacgactgcctgcccctgggcgggaacgtccacttcccgcacggcggaattgtccgtatctgcggcgagcccctttacggccggagcgtcagccgggagaagttccaggcaaccgtctttcagggaaatggaaacgcgggcgcggacggccttgtccgtccggttgcggaccagggcgctgagcatcactacgtctttttccacaaagaagcgcggggcctgcatgctgaccatgaagtccttcgtggtcaggaattccgcggaagcctgccctacctgcaatccgggggtgatggcccaggcggcggctttccaggtggtcaggttgtccggcatctccacaggaacggtaacgttcccttcctcatccgtcctgagcgtgccgcaccacttgatgcagtccgcaaaattggtgcgcagttgaatgtgcggggaactgttctcctgcacgtctgcgtctccctgtccggctgcaaaggaatcactttctgcgctttcttcatccgaagccatctgctgcatggccggaaccggtgcggcggcggggactgccgctccttcagccaatacgcggcttgcggcttttccgctgatagcataattaccggatctgactcctgcggtagcaaagccgttgacggctcctttttccctccgcaacagatagccgtagtcactgtagagcagggattggaagtagggctggtccgggccgcggtcctgttgcgttccggcggccgtcatttttttcaggctgagaaagccggtttcgttcaggctcccccagacggtcttggcgatgtccgtaatattggggcgtgcgatatattccagagccttgtcatagacggccagggtaacgatgccgttcctgacgggtttgccgtccggccctttgacctgaaccgttactcgcccttcttcaccgggctggtattgggatttgcccggtgttacggaaggagccagaatctggctggctggcggaatcagcagttcggcggaagccgtgtgaagttccccgtttctgacggtgaaggcgttcacgcccatgttgggcatgtcttcccgggtcagggggcattccaccagggcggtttgccggtccagagggaccaggctgcgggactcgtctttccaggaattgcgcaggaaggtccagacgcgggcgtccggataatcagaggcgaggagcagtttggccgtatctcccggtgcgtattccttcttgtccggagtgatggaaaggggattgattttaaaaggattctgtttgcccttgccgtaggaaaggaactggaaagactcttccaccctgttgccgtgttcgtccttcagggtagaggaaagggcatacaggccggattccctggtctggaaggacagggtggcttccccttcctttccggtggtgatattccaggtttccagagcctcccggctgccgtccgcgcggatatgctgcaaaacggaggttcccttggcgtgagcaatcttggcgccgtccgccgtggccgcggtgatggaggcctgcaccggcgttccggtgggggcgtagccgcggttcagggcggtgaagatgttgaacgggcggaaggtggcgatgacctgcccggaagcggaaacttcccgcagggaggcatccgtcacgctggcggagacgcggtaggtgatattctgggatgcgaaatcccgggcgtcctgcgccgtggaaagctccacggacgcttttccgtccttatccagcggcaccgtcttttccaggacggtcaggggtgcatccggagaaaagggaatgtagtacgggctgaaagacctgtcgtacagccagctccatttccagtagggcgtccagacatccgctcccagtgtccgggtgatcgtaatggtggccttcccctcgcttacgggaccgcccgcgtaatagtccgcctgaatggagacgggaatgggccggcccaggcggatgggtctggagggggcgtccatcctgacggagaattccggcttcttgtactcttccatacggaagagaggggcatacagccggaaatccgggtccgcggaatcatgcagcttcagcttggctccatactggcccagcggagcttccgcaggaatgagcagttccagttcaaaacagccggtagaatccgtcgtgacggtttttggcggaaaaacgctctcatccccggttggggaagtaatggtcagcgtcagcttttttccggcgcagtccttcgttccgggatttgcgatgtccggacggaagaggacgcccttgaaccgcgccgtctgtccggggcggtatacgggctggctttccaggaagaagcaggaataggggtcggaggccttgtttgccgtatccatgagataattgccggattcccagccgtaatccgatactcccgccagcacatagctgtcccctttggaagcgatgcccaggaacatgttgtaagaaggagtgcgggaaccgcggggagggattgtttctatcatggctccgtccttgtccgtggttcccttcacctggtgtttttggagcgttttatcctcctggtagcgaaggaggcgcaggctgcccccttccacgggcattcccgttccggcatccgccaggaaccataggttgccttccggcacggaacggcgcaccaataccatgtctgacagagtgaggaagcggtggaaccggtagccgttatccagcgtgacggtaagcaggtaccagccgggcttgcgggtgggcacgggaatctgggcgatgcggttcaggtgccgttccccgggagccagagctaccttttcccctttgatttcttcacccagatagcgggcgtaggacggctcatgcagcagattgaaaaggagggtccccaggctggaatactttttcctgtacgcgttgcccagcgtgctggaggtctgcaccttgtccatgcgttcctcctgccaccgcttcatatccacggagcgggccgtcacgctggcctgggcggcgttgcggtaggagaaggcgaccgtcaccggttcccccgccagcagcgttcttttatccgcatcaaacattccgttgggttccgtgatggaggcaatgcgcttcttcaggttgtccgcaacgtgcaggaaatcctccttgtccgtttgattccaggattgtgcgttccaggtctgaaggattttgcctaaaagctccgcggcagcgggcctctggttgcgggccaggaactcattggctgccagattgccggcgttaacgtaataatccggctccggagttactcggaccgcagcggcgatccggatgaaatcgtaatccggaggaagggtggtgagcaggaattttccgttgcccgtccggtcggttttaacgacggtctggttcgttttcaattcctccgggttgatgcccgccaccatgcccgcgttgccggggccgtacacgaactcctggtccggagccgtattggaataggagaacagccggtggcaccaggaggcggtgaaatagttgacctggttggctagttccgggttcgcctgaatggcggcgtccagcagccagcgcatgcgttccccgtcgtttttagccgtctcccaggaggaagaggcatggtaaaagacgacttccggcttccccgttttggcattgaccgtgacgggcacggtggcgacgttccggaacgggggggcttcctccctggcgacgtaccccggcagttccttcaggctggtgaggttccccagggcggcgtaagcctggaagggggaaagggaactgtagcggctgcctttcaccagcaacgcctgagccgtcatgaagcgcagttgtcccagaagcttcatgttcttttccttctccgccagttgcatggccttggaaaggcaccgcagggcttccacccggtccctcgcttccccggaatattccccgtcccatggctcggcgctgcggatgtaggcgccgtccaccagtttgaacgtatggctggcgttctggtacagatgggcagcgtccatcaggaaatagggattgccgccgtggcgtttcatctgctcttgcaggatggtatccagattcgtggaatcgtccagggcattgagacgggtcaaagcctggtaataaagaagaaggtccgctccgctgtactggtcgtcgtattcgtcaagctgttttaaagcctgtttggccgcattcttgaacaacctcttttccaaaagcttttcaatagcctcaacggactgcttcctctgctgggagatggaagttgccttgtccgcatccttggcgcctttttgggatgaagaagtggaatcttccggaagtcctcccttgtcatcggcatgggcggacgggccgtcctgacgctgtggtggagtggaagcggctgccgggcacggcattccggaagccagcaagcctcccgccagaaaaagcagggaaaagattctgttcattcaaccagactacttccatgtaaaatatttggcaagttacaagtaggttacaacatgcgggagattgtcttaatgccgttcaatggccagaagcgttggaaggattgactttcaacgagcaaaccggacttcttttacgttccggcctgtattccggtgcggatcgtctgccgcggcgtcctttttgagctttcagggcggcttcctcaggttcccctccggaggatatgcaaccgccgtcttctcttcttcccagggaaagggactgcctgggtatatttatattccactgccgtcccctcgtcccgaatcagctctgccggatgagggagccgaaccgcatgcatgttcatgtctctgcgggagggaaagacggcctgcatggctggccgtcccggaatgcaggatgaaggaagaaacggggatgccgtcaatcgggcagcgggccttcgcatgccaggcggtaaatggcctggacgtcccgggcgtccagtttttccagccccccgatggggccgcgcacgctgatggcctgttccgccatcagtggaaaatccccggacttgatgttcaactcttccatggtcgtcggaagccccaattcccggtaaaaacgttccagacgggaaatgccttcccggatgagggcatccggctcccggaaggaaccctccacacccatcaccttcacggcgaactgcgcgaacattccttggtgtttgggggaaacatacttcatccatgccggggtgacgacggccaggcccgcgccgtggtccacgtgatacagggcgctcagttcgtgctccatggcgtggcagccccagtcctgttcacggcccacgcccagcaggttgttatgggcgaggttgccggaaaacgcaatctccgcccaggcgtcgtaatcgtgcaggttcccgttcaggatgcgggcgtttctcatgatggtgcgcagggtggtttcgcaaaggccgtcggaaaggtccgtatgcagggttctggtgaaatagcgctcaaaaatgtggctcatcatgtcgctgacgccgttggccatctggtggtgcgggagcgtgaaaaacaattccgggttgatgatgctgaacacggggcgcaatttgggagaaccgtacctcagcttccgcctggtttcttcattggtgatgaccgtgttcgggctgctctcgctgcctgcggcgggaatggtcagcacggtggcgacgggcagcgggtccgcctgcggctgttgtttggaaagatacaggtcccatacgtccccttcatggggaacgcccagcgcaatcgccttggcggaatcaatcacgctgccgcctcccacagccagcacgaggcccaggccgtgttcccggcagaggcggatgccttcatataccaggggaagcgtggggttcggctggacgccgcccaattcctcatactccacgccggcggctttcagggaagccgtgacggcgtcgtaaaggccggaacgcctgatgctgccgcctccgtagtggaggaggacttttttgccgaacggcttgagaagggcgcccgcttcatgctgggttccttttccgaaaatgagcgtggtcttgttatcgtaaacgaaattgagcatggcggggatgcggtgacggtacctttaacgctacggctcttccatccccggctcaaggcttttgtgcgccccgttccgcttccggaagggcggatttattgttccggaggatgttttttcatataccgttccaattcctccctgtttttccggagctgattcaattggccggagccttcctgaagataattgacgtctcccgaagtccagaacgaataaacgtggtccagcacggatgactgaataggggggcaggaatcctcatcttccatgaattcttctttcagagcttgcagaatcaggtctttgcagcccaggtccgtactgaacagcatgccagagaaggctccgtgatgattcttgccgccccggaagcgggaaagcaaatggagataggtcttcaattcctgttccgcagcaggttccagtttcaaaaaggaacgccggactctcatttcttccccgttccaccacaaatcatagggcgtcatggcgggcggatggtccatccggctgaaatcgtacagaaagcgggaatgccgtcccagatacgtggtggctgtgtggagaaatccctggtggatataggcgcccccgcactggccgtccgaataaattttcatccaggccgtggcgtgttccggagcattggggaacagatccttccagaccggatttgttgaaagaggcagcgtcatacactctttccgaaggaatgcttcagcagacttgccctggcgcaaagagggctttttcccttcccaaaagttatttgccgagtcaggacaggaagaataaaattttgcgtccaactctcgccagtaaaaaccgcgcgggggaactttcttcatttccccggcaattctgcgggtgtcggcgcataactcatgaatcatgagctgggtctcaggcgtaaaattatccatgctcgccgcgtcaacaagaagatggaaaatgtggaacatctggcgtttcaggggtaaacggccgcggtaagaatgcagttccgtggcaatcagtccgggagccgcggagtaaaaggaatatccttggtcacagcacccgaacatctccgcaggaatgtccagcacggcggtttccatgcacttcttccaggtggttttgagttcctgcgccagagcatgcggcaggatggcaacgccgcggcgaacgtaattcctgctgtactcctgccaatgcagacggcggattttttgatccttccatgcattcagcagagcggcagaggggtgtagccatgcagggaatgtttcttccggaaaataatccggaagatatttttcaagaagggaggcccaccagctcttccacaggggagcgctgttgataaaataatctgttttgttgccttctgccgctaccgcccagtggagttcgtttcctatgagggcgactgcgcgttccggctcccaggagggacaatccacagcggccatttcataattccgggccgcttccggcaaaagcagagacaggacccggggagtataccgttcccattcccagtaaaggcggagagggtaatactttacctcctccgggcccaatcctgtttgatccggggttggggcgggccggtacatggcgcgtatggccggccttgcgtccggcaggctgtcatgacaatggccgtatccggtcagggaaacgcagagaacagagagaaaacaagcagttgggaaaaaactcacgaaaacggttctaggaaaaaaatgcttcaaaatcaaggttcatggagtaattgccctgctttttgcttgagcggggaaaccttcccgtttattgtcctgcacggacaatgtccggtccccgtagttcaatggatagaacgggtctctcctaaagactagatgcaggttcgattcctgccggggacgccacctaaatccttctaataccttgcgtaagtattgaaaatgcaaggatttttatttattgcattcccctaatgcatctctgatcttctgggtcgagctacattcaagggtacattttgtacttttcacaagacatgcccgcaatttctccatcatgatggctgagtggaagaagagaaaccatgcttggcttgttgcgttgtgcgttgcagggaacagcaggtaaaaacggagagaatacccgccattctcaatggtggcccatccgaaaaaacgaaagcttttgtaatgaattgattaaggcaagtaatttgacactaactccggattgattttagtttcgagtgccaagtgttctatcaagcaatttggcctttcaatcttttttcaaggtgcgatcgataaattgatgaatctcttggtcggaatatcctgccatcttgatatatttacgaatctctgtttttttgccgggaaataaattagtaagaagaatcatgaaattcttctccgagcgttcaataatgttctttagcagaaggtttcgggaagtttgcgtgttgcttacaacggtgtaatccttgaattgctggtcgttgtcatgaatccgtttgttcatgtctttagagacgtcatttatctttttttctgtttccggtcctgttcctttttttggatttgagcaattttagaaaatgcgttttccatgatttcaatgtttttcttcagcgtggcttttgcttctttatcagaaacgaataccggttcgtccgagtaggattttgatttagtgccgttgaggaagtcacgcataatggcagccccgtaggatgccatcgattctcttgatgctttatcatcgggaaaaaggtcgcgataagtggaaatggcgagcatttccagggcttcctccttaagataaagatctgcgtcgcggctgtttatagtgcgccttgcctgatcggctgaatctatggtaagaagaggtgtattggcgataaaataaagaatccaagggatattgttacgaatttcttcacttggaaattcattttctcctgtagacttcctgatgcgttcgagctccatggctgcttccttgaaaaattcttctgattgacctttatcaagaagtttttttaatgttgatgctgatgtctgagcgttttttaaaacctcaagagaatcaggtttgacgaggctggcatcaaataattgtatttttgccatagtaggatagatggaaaaaatgaaaattccaattgatattaatatatttatcattttatataaaaatttataatatttgttctatagcctttaccgaaaaagggactttgaattttgtaatggttccggaacagtttttctgtttcgggaattcaggatcatttgtccgtgtgacggtaaatgtctgttggatttgttcaatacgcttcttaatttgagttgcttcataattggataaccatgtccatttgcacgttccgtttaatttggcaatggtgttaaataacataaccaaagttacgtggtcatctaattcattgcgcaaattaggaggatctcccttattgccgggatcatggtcgttaagtttaaatggcggaggttcttttgggtcaaggacggtacccccatctttctctataataccacagttggaaaagctaacggacgttggatgtacagtaatgataatgtacccagtaatgccgaacccaatatttgattgattgctgtattcttctcctttttttcctgttaaacgagtaggttttttaaggttaaaagtaatttctgccggaggaaaatcctcagcttctgctttgacggtaacattattattttccatgatcaagtcagccatcaaggttgcagtggttccgcgtccatttaacgttgctccttttcccttcttagtccaggtaaccttcgtattcttattcaatggcttgcctcctttgcgtgttagtgtcagtgttacaatttctcctatgcctatttcttttcgccccttatcctttttttattcaattttttaatgatacaatcagctgatgggttttctgtttgggatgtgatttccagcatcctgttttctgcatgaacgtctatgacgttcataagggcacaggcgaaggcaatcataaaatatttctctgttctcatggcgttggattaaaagatcttaaaggttagaatggataaaatgacttatagagctggaacgcgcgaagtcaacttgacaaggttggactctatccgggatttacactctcttgaaatggggagggctttcagcacttatatgatgtgaatatatagcaattctggatttggctatattttttaaagtaattttatttccttgttatttgagcagatttccattttaccatgtttttttatgaatagtggatggaggaaaggaaaaccacggagagcggcgggaaagcaggaatactgagtggtcgctatgtccagcttgttttcaaagcgttcctttttccttgcgcagacgttagtgtttgttagattgcccccgtcgctacctccatgaagtgtttttccgcgtgtctctttctcgtgtgttcagctatccatcccgctgttgcttcaacgaatgttccgttgctccgggatgcggcgctgcatttgtccttcctgagaattctggtggaagatcctgtgaccaaaattattccccagttgctgctggggatgtcatgcgtttatgaagatcagcttgggggccccgttttttatgaagaggccccggaagagcttgtctgcacggattcaacgggaagaagcctgaagatttacagggtttccgccgatgcaaccaaggcgtccggcgtgggacacggtgatcccgtctggtttgccgtcgctatccagcgccctgatcccggtgcggagtgggtgcgcctccggggatttcttttgtgcgcttttgctgatgacctggtggagctgcccgctgtagtcctgcctctgctggaggaaggaaccagggtggaattgcctcttgaaaagccgcggaaggacaaggtggcccttacgctggaaaaaaactttaaccgctggaatctgaaggtggagggaaggagtgatttttatttcaattccatgagtgtcagggaggaaaacgggcttcccctgaaaggccgcggcgatttgaacagccggggcaggaagatgcgcatgtgggggaaggattaccgtgtttccgcccgctgccgctccttgcgcgtggtggtttcctattggaataagcgcatgttccgcaaggtgcccgtagatatgaagatcggcctgggaggggctgccattcccggctgttagtccgaataagcagatgaaatggtttgtcacaatcgcctgctggtgtgcgggaacgctgatggcggcggatgttcccatcaagagcgcttcttattccggcaccagcttgaagggccccgtcatcgggctgtcttccatgggactggtgaggggggagccttttaatttcaccaagacaggcatcgtgctgtattgcgtgtttcccggttctgaaatgctggctccggaacagccggaacaggaattgacggctgtcgattccaatggcgtgcgtctgagggtgcgctccgtccgtctatgggaaggggttattgaggacaagagcttgaggcgggtaaacgtgagccttaatttaaaggatgttccttctccgggagcccgctggattcaggtgagcggcactctttttctccctttgtgccaggggctggagtctctggatttcgggatggtggaattgaaggagagcggagtttccattccggtgccggaccctattgccgtgcggagagccctggagaataaccgggtggaggtagccgacatgtccaagctggagacggtgacgctgaaagtgaccaggcagacggggcgcagccgtcatgcgccggcgaacgaaccgggggaggaatggaagttcatggtgtattccgaggtgtattcggagaagatgttccgggcggaggattttgtgtttcacgatgtgaaaggcgcaagattgaagcctgtccctacctgcgaccattcttataatgaatacagggggaagtccttcctgttcaggaaatcgccccggtttgtagaagtggccgccctgtaccagggggcctcccgcatcaggccggttcccgtgaatatcaaaatagggataggcggcgtggtgccggaagtccttccggcgcctgcggaggttcctcaggcagattccggttcccgctgattggtctccagctatcgccgattgcctcaccatttgagaagggcgttgcctccctgggcgaatccggagagcagggtgcctgccgcggcggttttctgggctcttgcattggcgcggcccatgtactgttccatgttcgcccggttgtacagggactgggcattcctcatggctgccgccgcttcatcctgaatccgggtttgcaggcgcgtcgccagggcctgttccctgaccggcacggaaccatcccggagcagggaggactgggcggcgtccaggcgggcgtcgcccatttgccgtgtggcgtcctgctgcatgcgtttggcattttccacgcccgtctgtttctggaggtccgcctcgttcctgagggtggcggcgtttgcatccgccgcctgcctggtggcttctgcactttttttctgggcggacgcggaggccgcgcccgctgccgccgaagtggcggccagtgttatcattcccaaagatgctggatcaaatcccatgcgcgcatcctgatacgaaaaacggttcaggcgcaagacgcccgaaccgtttgacatgaatcagggtttggcacagaagggttgctattcaatcacgatgctttcaatgttcagcaccggattttcaggagtggaatgaggatcaatggttccggtaatgatgacggcgtcacgttccttcagcccgttcacacctttggcggagtgtttgatgggctggccctggtcatccacaaattgaacggtcatcgtgttgtttttccgtatttccaccggcaccgttccggtggaccacactccgcgctccttcatgttggccaggagctgggccggatccccgatggtgaaggaggcaatattttttgagaaaacgggttcatcccccagtacggctcccttgacggtgactttatcgcctggcgccgcttttctggcatccgagacgacgagtgcccgcgggaggcctaccatgttttccgcgaatctcacggccatctgctgggtgacgttttgatcggaggtgagggcattcacggtttccttggggttgcagcccatcagggaaacggcggccatggtcagggtaatgaagtgtgtggcttgcatggaatctcctttttgctgaaaggttggattccttttcaccttctgccgttcatccttgccggtaaggaaaagaatatttttcacaggaacaagccggccgccagcatgaggaggtccctgagggcgtcccacagcctttccgcattgtggacgcagtccgtcaaaaagcggtgcaggcttacggcgttgaacaggcgcagcagcaccaggaagagaagcaggttggcaaagtaaacaaggattagggagaagaaggttccgttgtccgccaggtccggctggtccttggggatgatccatgccgtccagaacaggtggaagcaccaccagaagcccaggccggagtaaagaagggcctggcaggtgaccgtgggccagaagaggtacgccatcccccagaccagcccccacagcatggcccaaagaggcagaaaatagggagaaagggagatgaagaggttgtttttatccgtctggatgtatcccccgtccagatccgccttgaaggcatggatggagccgcggctgcaaaagaccgccagcacgtgagtcagttcatggcccagcacgtacaggtacagcagggatgaggtgaacagcctgctgctgcccagcaccacccacacggccgcccccatcagggcgtaccatacggggatggagaagaggatgttgagactgccggaagcgtgggcgagctggtcgcacagggacatggccgtaatcagggccagcgggagcagaagaagggtggctacggcgtgcctgacgaaccgggttttgcgcggaaggtccatgaaggtgaattcctggcattcgtcctcccagcattcggaggtgacctgggcgcggtaggtcttgtcccaggcgtcacggttgcattgcctcatcatgtcgccaaggcttgccgtggagcgcggcttccgggcggtttctgcataccggcgccagtcctggcgcggcggtgtgtgtctgggtgccttgggcatgcggtggtgaagtgcaaggccagcataaggggacttccgcataaatgcgaaccaaatttgctgcttccggaaagcgggggaaaaaatgttttatgcgcgccggaacttcctgtataatccaccgcatgcaagatgctctgctggttctggaaacttcctgcgcgcagtcttccgccgcggcatggggcggaaaggaactgctgtgccgggtggaatggagagctgaacgcaaccattcctccgccatctttgaggcggtgcgccaggcgctggatgccctggaaggacggtgtttaaaggaaattgtggtcggttccgggcccggcgcctacgggggaatccgcgtggctcttgccgtggcggacggcctttccctggtgcacggttcccgcgtggcggcgttttcctcctggaacggactgggcattcacgacgggaaggcctgcgtgatgtccgacgcccggcgcggcggctggacctggggaaggctggaaaacggcattctggcggccgctccggaagtgctgcccgcagagcaggcccgcgcccgcatggcggaatgcctggaaaatggcgtgcccgtttattccacggaaacggcggaaactctggcagcccgggaaatgacggggggcgttcccgtgtacccgcatgcagaggctctgggagtcgcatggcagtccctggccgcgggccgcagggaggaacttttggaaggtccggcggaaccgctgtatgtaagggcgccccacatcacctgcgccaaacgccccgcgtgggccgtgaaggcgtaattaaggtttgactttctggaagattgttagacttttaatcggtaatcttcatcactagtagcattttttaaaacatgagcaatgacactttttccgcacgacacacatatcccaaaggtttaaaaggaatcatagctaatgaatctgccttgagtgatgtgcgcggtgaggaagggcgtctgctgtatctgggctacgatattgatgacctggtggagatgtgctgttttgaagaagtgatttacctgcttctcaacaagcggctgcccaaccgggatgagctggagggcatcaagaagcgcctccgttccgaccgcgaccttccccagcccattctggatttctttaaaacggccaccaagtccgcccggcccatgtccgccctccggacagcggtttccatgctcggcatgtatgacgaccggacgaaggattccggccagttgaaagagataggcctcagcctcatcgccaaggtgcccgtgatggtggcgtactattaccgtctgtgccaggggctggatcttccccccgtgcgggaggatctgaatgaggcggaacatttcctgtggctgctgaaaggggaggagccgaaccgggatgaagcccacattctggacgtggcctacatcctgcatgccgaccacggcatgaatgcctccacctttgcggcgcgcgtctgcatcgccactctttcagacatgtattccgccatcacggcggccatcggcacgttgaaagggccgcttcacgggggcgccaatgaaggcgtgattgaaatgctcaaggaaataggtacggaggacaaggtggattcctacattgaggacaaactggcgcggaaggaaaagatcatgggcatgggccaccgcgtgtaccgtgtgctggatccccgcgctccgcatctgcgccgcatggccatccgcctttcctcccggatcggggaacccaagtggatccgcatgtcggaacgcatcgccaaacttgtccgggaacgcaaggggctgaatgccaatgtggatttttattccgccacggtttattacagcatcggcattcccactaggctgttcaccgccattttctccattgcccgctgctgcggctgggtggcccaggtgctggaacagatggaggacaatacgctgtacaggcccctgaccctttatacgggccccaaggaccgcattccggtgcctaccattgacatgcggtaaaagttttttaacggaaaaggcgccggagattatctccggcgcctttcctgtgtcggctcccgcgcttttctgcttctcctttctccctcatgaaaaattatcccttctacctgctggcggtattcgccgtgctgttcattgcccttggcatttccccttcttcccgttccgtctgggtggcggaggtgattcccgtggcgctggcggtcgtcctcctggcgaccgggttccggagattccgtttcagcaactggtcctacacgctgatgtttttctggctggcctgccatacggtgggggcgcattacacgtttgcggaagtgcctttcgagtggttccgggagctggtgggagcccaccggaacccgtttgaccgggtggcccattttacggtggggttttatgcgtttcccgtagcggagtatctggtgcgcaagcaatatgcggggaaagtgctggcggggattttcggcctctttttcgtgatggctgtagccgcggcgtatgaaatcattgaatggcagtatgcggtcattgtgggcgggaatgacgcgaatgattttctcggctcccagggcgatatatgggacgcccagaaagacatgttctgcgatacctgcggcgctgtcgcctccctgattctcttttatctggtgcgcccctggcggcggaagggcgcggagaccgcttcttctcctggctagggagcgccttccatttctgattggaccgctgccgttgccgggaagtccattcatgcccgtggcctgtcgtgaccggggcggcaagaaggattgctccggtctccgtgtcagatgccgagctggcgcaatccttcatagaggacaatcgccacggcggtggagaggttcaggctgcgggagccttctccgggcatgggaatggtcagggcggtgcccgcgtgttccttcagcatgctttccggcagtccgcgggattccgggccgaagaccaggtaatccccctcccggaaatccgcctcccagtgggagcggtgcgccttggtgctcaggtaccagaaccgcgcggagggatctgccgcctgttttaactcctccaggctgtcccagacatgcaggtccactttggcccagtagtccagtcccgtgcgccgcacgtgcttttcatccaggctgaaccccagtggccggctcaggtggagcctggatcccgttgccagagccagccgccccgcagcccccgtgttatgcggaatttccggatggaacatgacgatgtggaaacggggctgcatgagcctattttcaccacaaacgcgccttccgttcaagtgggacttgtccaaaagtggcaaataatgtacgtttcctccgatgagagacatcgtgtattttgacttggaaacccgtcattccgcagcggaggtgggcggctggcacaatacggccgacatgcgcgtttccgtgggcgtgacttattccacagcttccggcaaatacacgatttattccgaggagatggtggacgaccttatcctgcagcttcgccaggccgacctggtggtagggtacaaccacgagcatttcgactacggcgtgctccagcgctatacgatgtggaatatgatcgacatcacgaacaacctcgatttgtgcaaggacatcgaacagcgcggcggcgtgcgcgtcaagctggattccgtggccgccgcttccatcggctcttcaaaaacggccgtgggcacccaggccctcaagtggtgggcggaatacgtgcagacgggaaatacggacctgctgatggatattgcccgctattgctgttttgacgtgaaggtgacgcgggatgtccactggtacggggcggagcacggtttcatccgttatgacgacaagaagggcggccaggtggagttgcccgtggattggaagttatagtccctttcccgcggcggcttttctatagggcgttcccgctcactccggcagaatatagagcggagagcagggaaacgggaacggcctccggaaaggaagaagcggacggcgttgattaacggcggttgatgcgggccacttcccgctgggcttcccgcatttccacgcgggccttcaggtcatagcgctggtcgcggtgggtcttgcctttgccaaggcccagcgccagttttaccttgccgtttttccagtacagcttgagggcgaccagggaacagcctttttgggaggtctgctgttccagtttgaaaatttcccgtttgtggagcagcaggcggcgcgggcggcgcgactggtgctgaaagaactctccggcagtttcccacggctggatgtcgcagccgtacaggagcatctggccgttttccaccctggcgaaggaatcggcgatgttcaccttgccggcgcggatggatttgacctccgttcccttgagttccatgccgcattcgtaggtgtccaggatttcgtaatcccggcgggctttcttgttggtggagatgtcggagctcatgactggaggggagggatgaaaaggccccgggctggaagagccgggggcctggttgaagaggggatgttccgtgcggaaatccgggccggaacggcaataagggggacgtgctttttactggctgtcttcctggagactgtcggattccgcatgatagacgagcttgccttcaacaatctccgtcagggcaatgttcgcgttgcccatgtggggggtggtggggaccaagggagcgcggccattgttgagctgggcaacgcggcgggaaaccacgttgatcagcatctggggctcgggaatgattttggcggcttgttcgacgagttcggctttcatgtaaaaaggtctaggtaggatctcctgatgcggaaagacatatacaggctgtgcctccccctaatcaagcctatattacggcatgagctcccttcgttcacgggagtccagctccttccacgcgccgggttccaggccggacagggtgaacctcccgatccggacgcgcaggagccggagcgtgggaaacccgatggcggcggtcatgcgccgcacctggcggttttttccttccacgagcgtcaattccagccatgaggtgggaatggctgcgcggtagcggacaggaggattgcggggcggtacgtccggctctccgtgcatggggcgcacccggcagggcagcgtgcggtacccctggatggagaggccgccgcgttccagaggaagcaggtccgtggcggacggaacgccttccacctggctccagtaggttctgggatgccggttggaggggttcaggaggcggtccaccagggctttctcatcggataaaagcagcagcccttccgaatccgcgtccagcctgccgacgggatacacgccggcaggaaagccgaattcggccagtgtccggtggtggggagcctcctgcgtgaattgggaaaggaccccgtaaggtttgttaaacgccagaatcatgccgtgcgcggcaagcgtagcatggggcgccgtctttggcacgagaaattgaagcggcttgacttgcccgcgccggggaaggaaagtaaccccatgcatggaaaaatggcaggttttatcctgatgctggcgtgcggcgcgcccggctgggttcaggcggctccggatgcaggagaagtgaaggcgaagatcgcgcggaaaatctggcagaatgaatgcgccggaacagtaaaggggctggtttcctggaaccggggggaggcgttcccctccctgggcattgggcatttcatctggttccccgccgggattacggaaatgtttgaggaaagctttccctcctttgtccagttttgccgtaagaggggagcacgcgttccggaatggttttccggcgcggccccgtggcgcaccagggcgggatttgaagcggcggacgtacggggcggccttcctgaacggatgcgccagtggctgtccagcccggcggctctgcaaatgcaggcggatttcattattgccaggtccgtggctgccctggggcgcatcaagagccagtcccgccgtccggcggaaatggctgcccgctacaatgccgtggcgacggcgcccaacggcatgtatgccctgattgactacgtgaatttcaagggggagggaaccaaccccgcggaacaataccgggggcagggttgggggctcaggcaggtgctggaggagatgcgcccggcctctcccggacagcctgcggcggttgagtttgcggaggcggccaaaagggtgctccagcgtcgcgtggacaacagcccgccggcccgcggagaggcgcgctggcttgccggatggcggaaccggtgtgattcctataagagaagcctgtgacgaattcctttcccggcggaaaagaccagttgcgcaattatccttgacctgccggggattagggtgtaattccctcacttcatcctgaaacttcgctaattttatgccaaacactcaagaagaaacaacgctgattttgctgaaacccgattgcgtgcggaaaaacctttccggcaccattttgaaacgttttttgtccgaagggtttcgcctgcgcggcataaagatgattcagcttgacgagccggtgctccgggaacattacgcccatattctggaccttgtcgtcaatggggaaccgcttttcccgaaactgcttgatttcatgaccagctctccggtcatcgccatcgccctgaaggggcccggcgtcattgtacgcgtgcgcgaactgctggggcccaccaattcccagaaggcgcagaaaggcaccatccgcggcgattacggaacggacagcatgatgaacatctgccatgcttccgacagccgggaatccgccgccgtggaactggtgagattcttccgggaagaagagctgtttgacagccttaactaaggttttatcctttttccatccggtttgtgacgggccgcggctgtaaaacggctgcggcctttgccgtaccgggaagcgcctttgtggaaaggaagggagtgccggagattgggaggacgggccggaggctccggggaggagggaaggagagggagcagcggattacttttcccagggagtggtcaggtaaaggaaggcctttttcatgcggtaggcctcccgcatgaagccgtccaggatgttgttgcagctctgcttggaaaaggaatagccgtaaacgcgcttgatggcggcgtcttcgctgtgctgtttctggcgttttaattcggcgtccatgtcccggcgttccacattgggggcgctcaggttgtcgccgtgccagcggaaatccgccagcagcctgttgtaatggacaaacttttttccggcacggcccaggcgtgcgtaatattccccgtccatatcgtagcggaaccgttcgtccagcagaaacccttcttcaatcgtggtgctccggcgcaggaacagtgcggtggaggccaggtaagttccgtaccagatgtgcatgttcaggctgtagggaagggctttcatgggccgctggagggctccgtccgggccgatgaagttccaggcgccgtgcacgatgtccgcatccggccgggaatccgcaaaagccttgaccgcagccagagcgcccggcagcagccggtcgtccgtattcagccacatgacccacttgccgcgtgccttgcggaatccgcggttgatgccttccgacatgccggaatccttttccacatggagtttcaggtgcggataggaattcaggatgtccagcgttccgtccgtggagcccgcatcctggatgatgtgttcaaaggtggctccttcctgattcttgacgctttcaatgcactcccgcacgtacctggcgtagttatagctgggcgtgacgatgctgaaatccggttcggtatccatggggagggctagttggaaggagcgatggagcgttccctggcaatgtaaatggggcgctttttaacttccgtataggtcttggccaggtactggcccaggatgcccaggcacagcagaacgatgcctcccatcaggcagaagacgcacaccatggaagtccagccgtaggcggaatggggccagatcaattcacggatcgtcaggacaatgatggaaaggaaggaaatgaaggagaggagcacccccatgatggaagccagcgccaggggagcggtggaaaaggccacgatgccttcaatggaatacaggaacagtttgaagaaagaccacttggtttctccggctacccgttccacgttctcgtattcaaaccatttggtgcggaagcccacccattcgtacagccccttggaaaagcggttgtattccttcagggaaagcagggcttccagcacggggcgcgtcatcagcttgtaatcccgggccccgtccacgatgtgcgtgtccgatatccggtgaatcgtcttgtaaaaggcgcgcgcgaagaaggaccgcagcggcggttccccctgcctggtgacgcggcgcgtgcctgcgcagtcgtatccttccttctcgatggctttcaccatctccggaagcagggagggaggatcctgaaggtccacgtccatgacggccgcgtaatctcccgtagcagcttccagccccgcatagatggcagcttccttcccgaagttgcgggaaaaggagatgaatttcacctccggggaatgctctgccagtttcttgaccatttccaaggtatggtccgtggaaccgtcatccacgaagatgagttccagggcataggccgccaggtgttccttgaaaacccggtctacttcttgcttgaacgccggaatggcctgttcttcattcaggcagggaacaatcagggaaatgcgtttcatggcaatgcccggatcatacgccagaacctgtccggatgccagcaaatagtgccctgtacgcagagcagccttcctccgccggagagggaggaaggctgccggaaaaaagggccgttcgcggagaaaaaggaaggatcagaacttcggcaggttgccgatgtcgtcctcgttttcaggggcatgcgggtctttgagatcgctgtccccgtccttgccgaaggaccagaaatcataatccggattcaggccgttgcccattttcaggttcttggcattggcggatttggtggggatggcctgctcgctgcctaggcggtagcggtagggggagccccacgggtccgccagaatgtagagggtgaccggcctcccgtccttgcttttcacgtggacttcccggacggtcgggttgctcttgggctgggtggcggggttcagttcgtcattgtaaatggtggtatccctgccgggcacgccttcattcttgtggtccccgaacagggccatgtaaacgacgttggagctgtattcctcaccgtttgccacggccacgccgtgattgttgaaaggggcttccgtaccgtaggggtagcggtcatggtcgctgtggtagctttccagccccatttcaatcttgcggacgatggattccgtggcctgctcgttctttctggtttcaagccaggtgtagatggagatggtcagcgtggccagcaccacgatgatgaccatcaccaccaggatttccatgagggtgaagccctttgccgcccggaggcggctgtatgcggatcgaatcttcatctggttctgcgtagggaggttaacccattttttcaatgacctgcagtaggggcaggaacatggcgaacacgatgccgcccacgaccacggccaggaatacgatcatgatgggttccagcatggaggtcatggctcccacggcattgtccacttcatcatcgtacacgtccgcgatcttgaggagcatgtccggaagctggccggtttcttcacccacgtccaccatggagatcaccatgggcgggaagagcttggaggaagacatgggcgttaccacggattcaccttccttcacggaatcatggatgaggccgatggcgtctcccacgatcatgttgccggcggtatccttggtgatggtaagcgcctggaggatgggaacgccggaggtcaccagcgtgccgaaggtacgggcgaagcgggcgatggcgctcttgctctgcacgttgccgatgaccggcatggtcagcagggcggagtcaatcttgcggcggccgttgggcgtcttgctcatggccgtgaagatagcatacaggatggcgacgacggcggccagaatgacggcgttgggcacgaataagggcgcggccatgaaccagtcactgatgccgaacacgaattcggaaatggcgggaagctcctggttctgttccgcgaacatcgccttgaatttggggacgatgaccagcatcaggaagatcacgatgcccaccgcaatgaacagcacgatggaggggtacaccatggcggagatcaccttgctcttcagtttctgcgccttttcctggtattccgccaggcggttcagcacgacttccagcacaccgccgagttcaccggccttcaccatgttcacgaacaggcggtcaaagattttgggatgctgggccagggcttcggagaaggtggagccgccctgcacggaatcgcccagggcttcaatggtcacgcgcaggttggggttcgcctcctgcttggccagcacgttcaagctctggagcaggggaagccctgcgtcaatcagggtggcgagctggcgggtgaaaatcatcagggccttggccttgattctgccgcccagcctgcctttttgcttcttgcctcccttggccttcttcttggcggcgggcgtttgctgaatcttgccttttcccgcttctacgatctgggtggggtacaggccatgcgcccggatggattccatggcctccgcttcggaattggcctccagggtacccgttttctggtcgcctttatggtcaagtgctgtatattgatatttaggcatatatgtggtgttttaagtgttttctgcttggtggttgaaatggtgggtgcggtatccggctgtccattaagtatacttcagcacttcttcaatggtggtattgccgtcgtaaatatttctcagaccgtcttcacgcagggtggacatgcccatttcaatggccttctgcttcagcaccacggagggcgcgcggtccgtaatcatgtcccgcagggtatcgttgatatccagaagctcgtagatccccttgcggcccttgtagccggagttggagcatttgtcgcaaccgcggcccgtgaagaaatgcttgtctcccagttcatagggagacacgccaagctgggagaggatggtggaggagggttcatacggcgtgcggcagtccgggcagatggtgcgcaccaggcgctgggccagcaccccttccagggaggctgccaccaggaaaggttcgcagcccatgtccaccagtcgcgtaatggcgccggcggagtcgttcgtgtgcagggtggagagcaccaggtggcccgtcagggatgcctggatggcgatctgggcggtcgccatgtctcgcatttcccccaccagaatgcggtccgggtcctgtcgcaggaaggcgcggagcaccatcgggaaatccaggccaatagcttcattgatcgggatctggataatgccgtcgatgtcgtattccacggggtcctccgccgtcagcaccttggaatcaatggtattgatttcccgcagggcggcatacagcgtggtggtcttgccggcgccggtgggaccggtgacgatgaaaatgccgttgggtttgtggaccgtatccagaatatattcatgaatatgcggggggagccccaggttgtccaggttcaggttgacggaagagcggtccagcacgcggagcaccacggattcaccgtactgggtgggcagggaggaaacacgcatgtccaccgcccggttccctatctgcttgacgattcggccgtcctgcggaacgcggcgttccgcgatgttcatgttcgccatgaccttgacgcgggaaataaccgggacggacaggtgaacgggcggcggctgcatttcataaagggagccgtccacgcggtagcggattttgaattccttttcaaagggttcaaagtgaatgtcggatgctttttccttaatggcctgcgtgatgaccaggtccacaaagcgaatgacgggcgcggcggcggaatcttccgtttcattgttgacctgcatgttgttgagctcctgcatcaggtccgtcatggcggcggattccccgccgtacagttcgttgatgcgttcggaaatctggtaatccggagcgatgaggacgtggatgtcttggccgagggcgaagcgcaggtcctccaccgtctgcggattcagggggtccaccaggcagacgtacaggccttccgggccgtgccgcacgggcagggcgccgtgcaggcgcacgagcgtggccggcatcatgttctgcacgttcgggtccggctggaagttgtccagcgtaatgaattccgtccccaggtcgctggcgatcatctgccagatatcgtccttgctgccgatgatgccgaagtctgccagcacttccggcagctccttgccggagacggtcatttcctccttgatgtccttcgccagggatttgtcgatcattccccggccgataaaaagttccagtgtaagattggtgtccataataatcagaatgaattgcgggggaaaatcagttggcgtctcccatggtgacgttcagcacttcttccggagaggtgaggccggccagcaccttgcgcacgccgtcctctctcagggttctcatgcccagttcccgggcgcgctggcgcagctggggggaggtcaggttctcgttgatcatgcgtcgcacttcgtcgtcgatctcgaaaatttcaaacaggcccatccgtcccttgaacccgccgccgcggcagaagtcgcagccgtggggggccttgatctggcccggagtgagacgggacatgtcaatgttcagcgtatgcgcctgcttttccgtcagcacgccgtccaccttgcagcggtcacacagcttgcggacaagacgctgggccatgatggcccggacagaagaggcgatcaggaagcgtttgatgccgatgtccgccagacgggccacggcgctgggggcgtcattggtgtggagggtggaaaataccaggtgacccgtcagggaggcgttgatggcgatgctggccgtctccatgtctcgaatttccccgatcatgatgatgttgggggcctggcggagcatggcgcgcagggcggcggcaaaggtcatgccgatgtccgcctttaccatcacctggttgatgccggaaagttcgtattccacggggtcttccaccgtgatgatctttttatccgggcggttgatgtggttcaagcacgcgtaaagggtagtggtcttaccggaaccggtggggcccgttaccaggatgatgccgtccggaagagtgatgaggcggtcgaacacggcttcatcatccgagaagaacccgagctgggggagacccagcaccagggctgacttgtccagaatacgcatgacgatgctttccccatggttgctgggcacggaagacacgcggaggtcaatctgcttgccgccgatgttcatctggattcggccgtcctggggcatgcgcttttccgcgatgctcatggtggtgctcatcactttgaggcgcgcgatgatggggctgagcagcttcttgggatgagtggccacctccaccagcttgccgtccacgcggtagcggatgcggagccggttttccatgggctcaatgtgaatgtcggacgcccgcatcttgaaggcgtccgtcagcatctgctgcaccaggcggatgatgggcgcgtctccgtcgtccccatccaggccggcggcgtctgccggaacggtcaggtcacggtaaaattctttcaggcggctttccaccgcgctgtgggtggcgacgctgaaaatcacgtcgcgccccatcagttggggcaggctgtccatggtttccagattcagcgggtcgtcaatggcgatgttgacggaaaagccgtcgtcggaaatggggatggcccggaagcgcctggcgagctccggcgtgatgagttcgcgcacctcctggggaatgtgcatggagcccaggtccacgacgggcagcagggatgtggaagccgccacctgcgcgatgacgtcttctgtaagataattggcctggatcaggaaatcgaccaggtcctgggtgggagatttttgactgcgcgcgtattgaagaatctcttcattcagatagccggcctgcgtaagaagttcgatgagatatgattcgttggagtacacgtcgatctctggagtctatggttggaagtctgccgaaacgggacggcaggatactcccctatttctgacaggttcgaggcgtaaagtcaacttagcttccctcaaaagggcattttttttcaggtgcggagggggaaggggaagacggccttcctcccatgccgcttgccgggcctgcggaatctcccggagggcgggatttttcccgctctcaggagcgccggcggggaagggtggaaagcaggtcttccagctccgccatgctggagacgcgagccaggcgggagcgcatttccttggctcccggaaaccccttcgtgtaagccagaatgcgggacctcatgtggcgcatggtgtggagttcgtccccgtaatggcgggactccagggccatccgggcatgacgcaggatcaggtccgtcttttcctgcggatccctggccggaggcatggcgccgtgcagcagataatatttggcgtctccgaaaatccatggattctccatggccgcccggccaatcatgacgccgctgacggctgtgttttccttcacgtacgctaccgcctgcggggtggaaatatccccgttcccgatgaccggcacggacatggcccgtgcgcattcgtcaatgatgtcccagttggccgtgccggaatactgctgggaacgggtgcgcccgtgaatggtaatcatggaaattccttcatcctccagcaggcggcacgcgtccatggcgcacaggctctggaaatcccagccaatgcgtattttggccgtgacggggatgcggtcgcccacggctttcaccacgcctccggccacggaggccagcaggggaaggtctttcagcagggaggaccctccatttttgcccaccactttggggaccggacagccgaagttgatatcgatgaaatccggtttctcatggtccaggattattctggcggcctctcccatgtggttcccgtccgcgccgaaaagctgaatgcctatggggcggtgcgcgtcttctatcttcgtgtacctccggtttctctcccatgcctggagaatgccttccgcagagacgaactccgtcaccatgacgtcaacccccagttccttgcagatggtgcggaaaatggggtccgttactccggccatcggagccaggaacaacgggaaatccgttttgataaacggcagggaagcggaagctgggcggttggaaaaagtcatgattccttagaatgaggctaacatgggcccatctcccgttcaagcgtcttgcccgtcctgatgaagaaagcggggtggggaaaatgcaggcggcgtgcaaatgcggccctcttttgaaaaagcctttatggaacgccgcaggcttctgcggcatctgagagaatatgcggtcatgggccgcaatttttgatattggttcgctggcgctcagtttttccggttgccgcaaaggcttgtgaagcccctgacggttttcaggccagggcgtgtgccggactggatacgtacatgtcctggaagggcggcgttgacgcatgccgtcaatgaaaaacggcttcacctgggagtgaagccgtttgacgaaaggttgaaagatcgcttttagtggttgccgcagccgcagcccccgtccttgtgatcgtggtcgtggtcgcaattgccgtcgcaatcgcagctttccttgtcgcagctgccgccacaggagcaggaagtctgggcgctcatggcgcgctgccgggcttcctcgatttcttccggagtgggcgcacggccaaggtcgatggacatgcccagataatgattgatggtgttcaggagttcatcgatggtctggcgggcttccaggaagccgcgggcggcatcgttcttgacaacgttttcacgcagggtatcgaacttggagatttcctcttccgtggggggcatgccggccaagtgcttgttgcgcagttcttctccgtaggcgtttacttcttcaaaaagcttggttgcctccggattctggaaaaagaggccgatttttgccttggaggccacaacctggtcttccttggcaagcaggttgcaaagggcttccgtggcggcgcgcaggttgtcattgagaacgggggtattcatataagattcatttaatcatgcctttccggacagggcaacccggttgcgaggcatggcgtacatttccgtgtcacggcctgttgcggattacaaatccgaagtcaatactactttttcatatcaaatgcatttctccaactctacccattatttccccggatattcttaacaagaagaatatttgttagaaattgtcatatatgcttgaatatgatgaatattcttcttacattcgcattgttgcctatctagttcggatttgtaatccgcacaatcccacttgttgctacccaacctatgacagggaaaaatgattccatggctatgctggggtggaaaatcccgctgacgcttcttatctggtccgttatcgtgattggagcgtgttcggatacctctcccttgtactccttttatccatctccggacccttccatttttttcatgttcgggcgggggctgcttcacgggcttctcccctatgtggaaatggcggacagcaaggggcccctgctggtttggatttattatgccgccgcgtggattgacgggcattcatttgccggaatattcctcattcagtgcgtaaccctttttacgacgcttctgctggcttgcgggacggcgcgtttttatctgtcacaacgcggcagcctgctggcttccatgctgttgtgcctgtttctgtttgattcgtttcccttccagcgcgggggaggggtggaggaattgtgctggccggggatggcggccgtggtttacgggctggtccggtatttccggatgcgggacaggcgcagcctgctgtttctgttcggcacggccggggtatttgccggggcagcctccatgatgaagttctccatagcctttcccgtgtgcgctttaggcggggttctgtgcctgtggctgtggtggaacgggcggagaaaagaagcggcggtggctttaggggtggcgctagccggcttcctggccgtggttgtcccctgttcggcctggctggtatccaacggtgtttggaaagaagcgatgaatgagtacctgttgtgctccgtgcgttatggaacggtgtcccaggataccacatggtgggccaggctgctcaggccggctccggtccgctgcctgtccgacgtactgatgtgggtggccgtcatctgggctctggcgatagcgggctggcgtcaattaaaaacgcaaaaggcgctcctctttacggccctgctgtatatcttcttcaaggtggagatgttcagcgtgtacaactactattacaattccatcctttcacccatgatgatctgggtgactatcttctttgtggcccgggcggaacggcgcttttccctgtgcatgccgcggatggcggccgcaacgctggcaatcgcctgcctcacggggaccggagtggctgccgggctgacgggcgccgtccggaaaggagactttgtctggaatggcagggagttttattcccccgccgtccgggaacggctggcctctttttccgaagcctccgtcctgtatctgggctggctggacaggggcttcggcattacctgggactggaagccgtgcggaagatactggttccttcaaaacttcccgtcggaggaaatggtcagggagcagtatgattacattgagcagggtataccggacatcatccacaccagttcacgggatgatgattcttttctgcggcagcacggctataagcctttgatgccggagctggacgggggattctggtgccgggtgtcacagggggacggcgagccttcccccgaagaataaaaggaccgctccatgaatgaggcggtccctggaaagtgggaagtagctgagtcggcgattagtgcgccttgcagaattcttcgaagcggtccagcgcttccttcagcacgtccggcttctttccgtatcttgtctgcattctggtagaacgggataatttgtccttcaatccatcagttttttgagccggggaagctccggttctgcaaagaacggtctgtctgaataggctgaatggggaatgacttttcttcccctgcttcaaaagaagttcacattgagcagccggattccaatgttgcgaacctttcggagctccataaccagtttgatgagttcttcgttgattttacgcttagggctatggcgcggccgccgggtttgcgctgtaagtccttctttcccttttgctttcattttcattgtttctttctgcctcagtgttgaagcgatttctatgaatctcacaatcaattatttgtatcaaaatcggatttccaatccggagacaagctataaatttgaaaaaaagcatttaatacaaaattatttggaccatagacagaaaatttgaatggacggaagacgtgcattcgggaaagaaacagatgggaatttttctattcttcctgttgccatcaggatttttcaaggaaccaaaaagcttgtcgtcaaaatgttataggttagttgcattgatattatttcccgttccagggatggagccttctttcaagccgttggcgcatgggccctgtctccggattggaaatccgctaatttgcattcattccctactggaaaacatgacatttatatccatgaaccattcagcgtcacgattttatctcctgctaaacttatcctgttttgctgcgcgcgcagctgccgattccccagtcatagcctaatatagcctttcaagcgtataacttctgaaaattgctcaaaatcgactaatccgtttccaaatccattcaataccatgagactacatcttccttcctctttgctccgctacgtgcttgcgagcctgttcatctgcaccttcccggccgcatccggtgcggactacacggtgaacaacacccagtccgccatgccgggcagcaacctgtacggcacattggaagaattgagggcgtccggtttgctgcgtgccaacgacacggttgtcctgcataacgacgactccacgctgacaggaggcctgaatcttctcattaacgttcagtccgacaacacggcggcagcgcgcacgctggatctggctgggctgggaacaactcccatgtttttcctgaagaaaggagaccatggcgctgacatgaattccatcatctgggagaatgcgggcaaccgggttctgcgtgtggagggatttggcagcaatgccactctgaatcttaccggagcggtcacgttccgcaacaatacgggaatctatgatgattccaccgctccgggcggcggcgcgattgccattcagggtcaaggtctcgcttcagtctcgctggatgacaatgccgttttcaccggaaattacgcatcttccgcaagcggagaggttagaggaggcgcagttctggcgttctccaacgacgcccggatcactctgggcaacggcgccgttttccatgccaaccatgttttggcgtcagacaaagcaggcggcgggggcggcgcaatgtttaccaagggcggttcctcctccattgaaataggtgatgacgccacattcacggacaactatgtccaggctggcaagtccagctacggaggagcgataggcgccgatagaaacgccacctccattaccctgggagaccgcgcgactttcagcggcaaccatatttccacctcggcagacggagcagccagtgaagggggggcgatcagcacctacatcacgattagagacgcctccgtcacactgggagacagagccgtcttcaccgggaattacatcttggccgccggaacgggaaaaggggccggcggggcggttgcggtgcgggcaaatggaggccctgcatccctcaccgttggggcgggtgcaagcttcacgggcaactatatctccgcgtcatccggtgacggaggtgccatctggatgtcttcagggggggcctgcactctgggagccaacgtttccttcaccggaaattacattcaggcgtcttccggaagtggcggagcgatttacctgaagaatcagcagctgaccattcgggacggggcgaatttcacgaacaattacgcgcccacggcagggggagccatcctgatcaacaatttcggcaccaacgccgcccagcaattcctggcgcagacccacgacgttcttttcagcggcaatatgacagggggaaccttcacgcgcaacgataacggaacgtttaccgtagacgggggaacagccaacgccatccatgttgaaaggttaggctctttgcagttggcggccggagaaggacggaacatccagtttgacgacccgatcacctcaggaacggactacgcaataacgctcgcgatcaaccggtatacggatgacaatgggactgatcacgacacctccggcacggtcgtcttcagcggaacacgctatcagggtacggacgcccatctggttgccagccgttacaacaatttccggggaaaaaccactgtatacggaggtacgctggaactcagggacggggtcgttttcggccgcacggggagcatgacggacacgggaacctcctttacgcttaatgccggagccactcttcgaagcaaaggcgccgtcagcgagatcaatgccgcctcgatcgttctcaacggcacggtagacaccgaaggcacgctcctgctgaacggaaacgtcacagcttccgacgcaatgctcaaaaccggacagggagtccttgacctgaggaataccggaaccaatctgttcacgaacggagttgcgctcaacgaaggcagcatcctgattaacgacatggaacagattcggaccggctcaggcgcgtacatcacaggttccggcacactggacatccggtccgcaggcaccgtaaccctcccggattcgctggccggatttggcggaaccattgccctgactgatacccggctccgtccggacgccacaggacaaaccgtgctcggcaccgcaaccctgcggctcggaagcggctccgaactctccgtcgcggaaaatttttccatcagcaagctgcatctggccggaggaacgcttaccgtccaggtggatggtgacgcttcccggctggaacaccagctctccgtctccggcagtcttgacatcacgtcggcatccacgctggccgtctccggtctgaaagacagtctggaccacatagctccccagccgggcttcctggaccgcgatcttcaggaactggctctggacggcaccatcaacgcggacgccctgctggtggtacaagccgggaacgtcgcgaatacaactcttctggacttggtggatgccgatacgggcgaagccatcaccggcggcgaggaacgcgaagttacctatcaggataccgttaccgcgacctacagctacattgccgtagccggcaccaatgagcacagcggccagacggggatccatctcacctacggactcaaggaattgaacatccatgatgggaaaacctgggttctggacgctccggccgatccggacagcgaccggacgctcatcgcccggattacaggcggcggcgcgctgcagctgaatagtgacgcggccggcatcaccatcacctccgccacgagccacacggggggaaccctcatcaattccggcctggtcactgccggagcggacaacctcttcagcgccggaatcctggaggtcaaggaaggtacaacatttgacacggccgccaccgcacaaaccaacagtaaagggtttattctgcaaggcttgctcaagggcggccaggcattctccaacacggacgccatgtatgtcttcaccagcgcgcaggtggaatcggcgcttgccaacaccggaacgctcctattggccaatacatcgggcacagggcaggacttccagctttcgggaggcctgaagggcgacggagggcatgtagcctttgaaggaagcggccgtgacacattgaagctcggctccctctccggatcgcaggcctttaccatgaacatcaacctggccgccggaacaagcgaccgcatcgccatcgccggggaggcttccggcacgcacacggttcatttcatcctgcaaggcggcattccctcctccccgtccttcatacacgacatgatcacatgggacagtctggcggaagacagtaatgcggcaacgctctttaccggaacgcttgatgcgggtttttactcctacggccttaaactcaacgcagcaggcaatggatacgacctgtcgccggagggctacaacaacctgggcggcgtactgctcaatgtgcttggctgcatgagtacgggatggtttgaacagcttgacaccctctccaaacgcatgggagagctgcgcatgggagcggacttttacaggcagcaggaccaacaggccaggaacgccggagaggcgcccagggggcactactgggcgcgcacggcttccggacgcacggacacggacctgggcatcgccggagtatgcggctttacggaataccagtatggggcggacagcggcgcggactggattgttgcatccgggagaaacagcatgctggctgccggtctcttcggaggatatcgccggagtgaccgccgcttccatgacggctggggaagcaagggcagcacggacagcggttacggaggcctttacgcctcatggctgcacagcagggggtggtttgcggacgcggttctcaagggaatgagctacaatgccgcatggagcgcggtccagcccgggggcacggaacgtggcggctatgacaactggggattgggaatgagcatggaagccgggcggcagtggagcagcgccggaggatggttcctggaaccctccgtgcaaatcgcatggctccattccggttccacgcatatcgtcacgaaccagggcctggaggtggcgggaagcgcagccgacgtctggcaatttgccggacgcctgcgagccggacgcacatggagcgtcaacggaggcaggcagctggtgcagggctacgtgaaaactggtgttacgcagcaggcaagcaatggcggtgaagtaaaggccgccggcaatcagtggcgtccgaatacggatggaacccgcggcatggttggctgcggcgtagcatggcagctcagcgcccgcgatcaggtgcacctggactacgaatatgtctacggagacaaatatgatcgtccctggacgatcaatttgggatatacgcggagcttttaggcacaaaggaattcatatctcttcctccacccggcaagttcactcttgccgggtgttttgtttctgccggtcctgccggaaagtcttctcatgaggaataaaaaaagaccgcttcatgaatgaagcggtcctgaagattggaaaaatcagtatttgacgcttagtgcgccttgcagaattcttcaaagcggtccagcgcttctttcagaatgtccagcgtggtgcagtagctgatgcggatggccttgtcattgccgaaggcgatgccggggacggctgccaccttgtagcgttccagaagcttgtcgcacaggttcagggaggtgagccccagcttgctggtgtccacaaagaagtagaaggctccctgcggttccacgacgctgacgttcgggatggcgttgaggcgggagaggacgtactggcggcgcatgtcgtattcgtcacgcatgtcgctgatgaagctctggtctcccgtgagggcctcaatgccgccgtactgcgcgaaggtgcagacgttggaggtggtgtggtcctgaatcatctggatggccttggcaatgggggccggagcggcggagtagcccatgcgccagccggtcatggcgtagcccttggagaagccgttgatggtgatggtcaggtcgtacagttccgggctcagggaggcgatgctgacgtgcctggtgtctccgtacacgaggtgttcgtagatttcgtcagccaggatgaggatgtcttcgctcagggccacttctcccagggcgcgcagttcttcttctgaataaacggctccggtcgggttgttcggcgtggtgaggatgaccatcttggtgcggggggtcatggcttcctcaaactgttccgcagtgagcttccagccgttttccggcgtggtttccacgatgacgggaatgccgccgcacatgcggaccatttccggatagctgacccagtacggggaggggatgatgacttcgtctccctcggagacggtcgccatgatggcgttgaagcaggcgtgcttggcgccggcgcccacggtgatctggctgggatcatattccagattgttttccctcttgagcttgtcggcaatggcctggcggagtgcgggcagaccggcggaaggggtgtacttggtagctccgttattcagggccgtgatggctgcctgcttgatgttgtcaggagtgtccatttccggctcaccgcctgccaaaccgtaaacttcttcaccggcggccttcatagccttggcccggttggtcaccttgagggtcagggaaggggtcaatgcagcaatgctgggggaaatcatgtccattgttgtggtgcgatcgtagatttttgatgccctggcggaaaacaggctattccccgcacaggcggaaaaactttactcactgagcgcacccctggcaaggagaatgcttgtgaagaccattctttttcttgcggagagcgcgcctcccctcgcggaagggaagtttcaatgtcagcgtttcatgaatttggcccgtaccgcgtccagttccggcgtcttgaacaggaaggccgccgccaggtaaacgatcccggcgcagccgcagaccagggagatgcccaggagcctggccgggaaggaccagtccagaaagccctggaggaaccacgttttacccgcccagcacacggctcccagcaggactcccgccgccagaatgcggcccaggccagagaacagcgtccgtccgtccacgccgcccagctggcggcgcaggtaaaggaagtagaagaggaagttgaaggtggtgaccacggaggtggtcagcgccagccacgccgcatttttatgcaggccgtagacaaagtagtagttgaggccaatgctgatggccagcgccacggcggcggcgatcaggggaacccagcgtttttccagggccaggaagacgggctgcaccaccttggtcccggcgtagcccagcaggcccagggagtaggcgcccagcacctccccggtatagcgcaccgcctcctggttgaagcggccccactggtacacggaggagacgaattccgttcccaggatgaaaaggatcaggaacgcgggcaccgcaaaaaacgccaccagccgcagccctttggcgatgtgggcagccacttccttcctgccgtctcccaccatcatgcgggaaaccgcggggaggaccaccatgcccgtcgccacgccgaagagacccacgggaagctgccagaggcggaacgccgtggtcagggcggtgacggagcctttctggaggtccagggcgaaacccgtattgatgaagatggtgaactgcgtgacgccggaagccagcacggagggaagcatcagcccccagattttgcgcacgcggggatcgtcccaatggaagttgggcttccaccggaagccggttttgcgcagcttggggagctgcacggcaatctgggccgcccctccgatcgtgacgccgcaggcaaagccgtacaaagccctggggccgaaagtggggtcaatgaagtatccgatcagcaggccgaacaggatggaggtgacgttgaaggcggcggaggccagcatgggcagcccgaagatccccaccatgttcagggcccccatgacgagggcggacagggaggcgaagccgatgaatggccacatgatgcggctcaggtccgtggcgaacaactggtccgtcagggaatggtccccgctgtaaagggcctccatgacggggccggcaaacaggatgcccagcgtcacgatggcgaccatcagcgtggaaagctgggtggctaccttgttggtcagctcccaggcggccgcgtcgccttccgcctcccgtgttttggaggctacgctggtgtaggactgggagagagccccttccgcaaacaggtccctcaacaggttggggattcggaaggccgtataaaaggcatccagcacccccgtagcgccgaacagggaagtgtacacgatttccctggccatgcctgtcaggcggcaggcaaagatggcgccggaggctaccaggctgttccgcatcagggacatgaaagagaagggcttacttgaacagttggcggcagtacggttccacgcgcttcatggccggattgtccttgacggcctggtcgcggtcatcccggcaggggaagagatacagggcgtaccctccgtagccgccgcccaggtattttttggcaagggcgttcgggatgtccggcaggggctgcattccttcgtcaagctgaacgctgtagtacagggccacgcctgcggccagggtgttgatgttgcgttccagcactccggtgcgggcaatgagggaggattgggagatgcgcacgtaatcgcgctgttcgtccgccattctgggagtgtcgtgttcctcccccgtgtacagaatggccattcttccttccaggaagtcgcccgtgcccttgacgtccagcacgggggaactgccggaacgccagacgcacagccccgtttccgcaatgacggcggggtcctgccagccgacgcccagagcgagttcggaagcgaccgggtcgcgtccttccagcatggcccacgcgccgctgccgcccagtccggaccgcttttcatacggccattcgcagagggacaccatgggggtgatggcgcagttgaccacataggagccttttctggcgtagcggggaacgtccagccatcctccggcaaagtccacgcggagcggcacggtggacggggccttgatccggttcaccagcatggtggtggaaacgggggcgaatttgggaggcgtcttgggaagcaccacataactcgcgcccacacgggagcacagctccttcttgatgccgctgtaaaggtcgtcctccgtcacggccaggacgtcgggcctttcctgaagaaattcctcttcaaagtccaggcccttcttcatgccggtgcccagaatgaccttgtccaccatgcgcaggctttccagcagcactttcttgtgttcgtccggaatggacggtttgcgctgcttgtggtgccacagcacgggttccgaggcaaaggagacgatcagatagtcgcccagggcccgggcttcttcaaaaaactggatgtgaccggcgtgaacgatgtcatagcagcctgaaacgaaaacttttttcatgcgcgtggtgatagataattagtccacggcagtatgccctattgctccgccggatgcaagagccgggtggaagtacgccaaaaaacggcacggaccttagaaggcccgtgccgttgaagaaaaagaaaaatcaatgtctgccggaaccggtcaggacgccatggcttcctggtagcggcgttccacgtcgtcccagttgatgaggcggcagaaatcttcaatataatccgcccggaggttctggtgcttcaggtaataggcgtgttcccagacgtcgcagacgaggatggggacgagaccgggaatttccaggttctggtgcttttccgcgccgcagatcactagcgtcttgctcatggggtccactcccagaatgccccagccggaaccttccacgccctgggaggcggccttgaattccttcatcatggcttccagggaaccgaatttttccttgatggcgtccaccagggggccctgcggttccttcttgggatcgggcgtcatgttggtccagtaaatggtgtggaggacgtggccggaaacattgaaggacaggttgcgcacccagttggtagtggcggaggcgtccagcttgccgtccgcgatttcacggagcttttcagccgcggcgttcgcgccggcgacgtaggccgcatggtgcttgtcatggtggatgcgcacggttttttcatccagcatgggttccagtgcgtcgtaggcgtacggaaggggcggtaacacgtacttgccgtcggcatagccgaccgtggagggatcttgctttttagtcatcttgtgctgtggttgtatagacggccctgttgcccgggcctggctgattgttcccagcgccgccaatgaggaaagggcgatgaaacgccttctgttcatgtccgcgccacgggaattcatggaagtttggacatggatggatttggagttgttcaaaaaacttagaacatcgggcatttttttcctttcccgccggaggctgccggaaaaagcttcctaccttctggccgccgcggcggggccctgggctccgtaggcgctgacgcccctgacggcgacggacccggcatcccccaggaaggatttgggcagcgtcacgcgggtctggctgcccggcagaaggatgcgcgtggcccactggctgccgtagcgcgcctggacggcccatttccgggagggattgccggacggctgccaggaaagggttacggtggaaccgttgtccgccacgtaaaaattctgcggctggcctggcgttccggttccgcaccagggcatggcgggagggacggccatggagggatacagcctgttcaggtatttctggatgcctccggcattccgcatgatggatttgacgctccagaagcactgcccgggggcgcttctggccagggagcgggaatagttgacctgcgcggctatttcagaggcggggcgccccgggtcttcgctgctcatgatgcgcgcggtggcgatgccgggccacaccgggcggctcgtgttctgggcggcccaccactgcatcaggaccggaaagctctgcttggccgggctgcagcgccagtaaagctgcggggccaggtaatccacccatccgcgggaaagccacttgcgggcgtcgcaggccaggtgctcgtaagcgtccactcccgcttcaatgccgccgggaacgcccggacgccagatgccgaacgggctgatgcccacgcgtacccagggtttggaggatttgacggacttgtacatgtcatgcacgaagtcgtcaatgcaggcccggcgctgggagggagactttccgtcgctgaagctggcgggggaccaggtgcggccgggcgtggggtaggggtagaaatagtcgtccaggtgcacgccgtcaatatcgtagcggcgcacgacgtccaggataaccctcatcgcgtggtcacgggaggcggaggcgctggggttcatcagcagaacggagccgttgcgtttcatcaggtccggacgggtgagggaaatgtggttgcgccccacggcgtgcttcacattggcctttgcccggaaggggttgaaccaggcgtgcagttcaatgccgcggcggtgggcctcctgaatggcgaaggccagggggtcataccccggattgacgccgggcccggagagccactggctccacggctccagggaggactggtacagggcgtccgcgttcgggcgcacctggagaaagacggcattcagcttcaactgagcgcaggtattcaggatcgtcagcagctccgcacgctgggcagcgccggaaaggccggaacgggagggccagtcaatgttatggacggtggaaatccacgccgcgcggaattcctgcggggcggcggggacggattctccggagggctgccaccccagcgcctgggaggccagggccagcagggagcaggaaagggcatggaaaaagggaaatctggtcatgatgggatggtgaggaatgcttccgggacatttaacgcccattcggtgaatctgtccatggcggatgccggcggttccgtcatggaagggcggcggccgcggcattcagcggggccgggacgccaggctgttgaccagatgagcgttgaatccggccccgaaaccgttgtctatattgacgacggacacgccgttggcgcaggagttcatcatggcgagcagcgtggttactccgcggaaattggctccgtagcccacgctggtgggtacggcgatcacgggggcttttaccagcccggccagcacgctgggaagcgctccttccatgcctgccacagccaccagcacggtggcccggcggatggaatccagatgggaaaccaggcggtgcaggcccgccacgccgcaatcccggtaccggagcacccggctgcccaggaattccgccgtcagggcggcttcctccgctacggactggtccgaggtgcccgcgctgacgatgccgacgaagccctccgtctgcggaacggggttcgccatgatgcgcatgaggcgcgcttccgggtgcatgtccgcctccggaaaggcgcggttcaggtagtccagcgcctccacgttcaggcgcgtggccagcacgttctgtccggcggcaagcaggccgcgggctatctcttcaatctggtccggggtttttcctgcgccgtaaatcacttccgggcatccggtgcgctccaggcggccgtaatcaatatccgtatgggaagatgcgggcgcagtggcggcccggattttttccgccgcttcctccgtggaaaggcggccttcctcaagctgatgcaggatggcggtaatgtcattcatgatggttcgttcatgctgcctctggaatatccttccaggtccagggtgatgtagcggaagcccagctcccgcaggcggtgcgctacgggagcggcaagctccccgctccggaacagtccgcgttcctcctccggcagttcaatgcgggccaggtcgtccccgtgaacccggacgcggcagcctttcagccccagggagcgcaggaaggcctccgccgcatccacgcgccgcagcagggattccgtcacggggcggttgtgctccagccgggtcagcaggcaggcataggccggcttgccgctgacggactccggcaggccaagtccgcgggccacgctgcggatgtccgccttgtccatggcggcttccagaaaggggctcagaatgccgagttcctgcaaggctttgcgcccggggcggtagtcgcccaggtcatccgtgttggagccgtctgccagcaggggaaagcccgcttccgcggctctggcagccagggcggaaaacagggcatgcttgcacaggtagcagcgcagtggcggattatccgcaagggaaggcaggatggggaacgccagtgtctcctggcgaatgcccaggcggcggcacagctccgcgctgtcccgcacttcctcctccattacatagggagtttgcgcggtcagggccaggcagtgttccggccccagaaccttggcggcagcagccagcagcacgctgctgtccagcccgccggacagggcgacggcgatgcgctccctggggagcaggacggcgcgcagccgttcaaacggagtctgtggaggaggagtcatgggagggggtggggaaaagccccatcaactggcactgttccagcggcagtccggtgttttccgccagggttctgcaatcttcaaattccgccttccggtgatgggggcgtccgttcatgaaagaggtttttacatgcaccgttccgtggggagtgcatacggaggcgctctcccggcgcaggatgtggcggcacgtatcatgctggcgtatccccggcgtgctgctgtgcaggaaaaacgcttccctcacgcggtccgcctgttccggcaggcacagggcgcagactttgaccgccaggcgccccttcttcatgcagatggactcctgccaggcgtccagcgcgccggcctccatcagcttttccgccaggtaggcggtctgttccggcgtcatgtcgtctatattggcgcacagctccgtcagcaattccggggaactctcctgttcctccgtttccaccagcatcacccggaggatattaggcagggggagcccctggcggtggccgatgccgtagccggttccggtgatgcggcccgccagcggggccgggacaggccgcgccagggcggcaatataagctgctccggtgggagtggtggcctcatgggtggttccgttcagggtggactggaagcggctcgccagcagggctgtggccggggccggaacgggcatcgttccgtgctggcaggtcacggtgcctgagcccagttccaccggtccagtgaagacggcgtccgcccggagcagctccaggcagatggcggcccccgtgatgtcaatgatggagtccaccgctcccacttcatggaaatggacttcctccggcgtggtgccgtgcacctgggcctccgcctccgccagcagggagaaaatggaaagggccgtccgctttacggcgtctgaaaggccgcttgccccaataagcctgcggatatccgccatggtccggtgatggtgtgcatggccgtggccggaatggccttcttccaccgtcagtacgtcaatccgcgttccctggatgccggactgctgcgcacggcggcattccagtttccattccccgtgcacgtgcaatttggacagctcccgttccaggctttccctgtccacgcccaaatcaatcagggcggccagattcatgtctccgctgatgcccgcgctgcaatcatagaccaaggctctcatgataggccagtgtagaaggaaaacatcccggctcaaggtcaaagtgagccttatctccgcagggttcccggcgtccggcagcgcgggtttggctcattgccgcccggccatgcaaagatggcctgtgaaatacattgctagagaacttcaaatatgccacaattcctgcggcgctgaccagcgccggccctcgtccatatcatgtccatcccgttcttttcgaaattacgatcccagaagcactatcttcaactggtcaagccggaattgaagcaagtttctgagtttgtggaagcccaggcatcctgttttgacccggaagtcaccgactacatggaaacagtgtgccagtccaaggggaaaatgctccggccggccctggttctgctggtagccggcgccacgggcggcatcaaggaagcccacatccggctgggagccctgctggaaatggtgcatctggcctccctcgtgcatgatgacgtgattgacgaggccgacaagcgccgtgacgaggccaccgcgaacgccctgtggggcaacagcctggccgtactgctgggggatgttctcttttcccatgccatggtgcttggtaccgagttcggcagcacggaattctgccgcaggctggcgaacaccgtcagggacgtatgccagggggaagtggcccagtccagccgcctgtatgacctgagcatgacccgcgaggaatactttgaaatcatccggaaaaaaaccgcctccctgttctccgccgctacgggcggcgcggcgtggatctccggagtggccccggaagtggaggaatccctttaccagctgggagacctgctgggggtggcctaccagatttacgacgactgcctggacatggtgggcgatgaagacgatgccggcaaaacgctccacacggacgccaccaagggcaagctgaccctccccatcttcaacctgctggaatgcggggacaggaacgtggaagccacgctcagagacgccattgaaaaccgtgaagtggtggattactccgcctttcaggataaccccgtttttgcggaggccctggacaagtcgatccaggtggctctggagaaaaacgaggctgcccgtgaaatcctgtggctccttccccagacggaataccgtgaggccctggcggaaatgaccttctacatggacgagttgctcaacgactgccgtatctcctgagcttcattcacatccttaaaaaagggaggacggtttccggaaatggacttcggcaacttgtctggaatccagaacgctgttcacgaaggcaggctccgtggcatttttttaaaccgggaccgtttcccagggctccttcctcatgaaacggtccctctatccgggcctgcgtgcctccctgcttcactggacggaaaatccgtttccatgggctggcttttttagagcgggagaccgatgaagatgccttgcaggtcagcaggcgcagcctctccggcggcctggcgaagcttgtgcgggcaggatggtgatgatttggttctgcagcaactgcactttggaggcgcgctgtgctgtgatgttattggtttgctggaggggataacacccttgattgctgttaccgagctcatctatatcaaataaccggttttctccccagtgcttggcgagcagtttggagttatccgttgttgcatatccggcaataacgcaccaatgtgcatgcggaaggtccgtccactggacgccagtccgggggaaaccgtgtttttcgttttgcttatcattgataacttgaaaaggaacgagggcataccctccctgatcaatggtgtcccggatggtttgttcatgaaataactggcaggcggcggagcagcttccgttggctctcgcatggatgaaacgggcaaaatcgtggggatggaaaacttcccctacctcgcttaaacagccctctgcacgattggtgaggggatattgaacggccaattttaaaagctccatattcgtccatgcggcatcaggattgaagcaattgaggacataggaggctgcgtaaaagccgcaggaggggtgggacgtctgccggtccatctcctcccgataggtattgggaacggtacacatgacgtagcctgcgtaatgggctgaggagaaggcgagtatattttggttccgtgtcatcttgattaccggggttcatggagccggtgaatgaagatatacggctggaggaaaattccggaaaggctggcttggcgggaggaggcatccggtttttaaaaggcgcctaaaccatgttgaaaaagggcgccgtattcaggattcggggtgtagcgttggctcgtttggaactatacggatgggaacaggtagatagcaaatggagaggggcaacgcgttttttggcggcggcagggagcatccggaatggttttatctttttcctcaggcgtcagccgggcctgcgagcatgcgcggaggcgggacggcttgcagacagccagcttccatgctaaaaggcagggaaggaaagtagaataattcggcgggtatggaaggaaagttttctcctgcgttctgcttcccggaaaacggtgattccggaacattgaagcaaacacggagcggcaactcccatcaacatgatatgactgaaaacgagacctttgagaaagtggatttccatgaaatggagctggatgatgaatactatgattgcgtattcgtcgcgtgtgatttttcaaagctggtcatccggaataccgattttgagaagtgcgagttcagggcgtgcaatttcacgctggccagcttcaagggagccctccgggatgttgcctttgccgactgcaagatgactggcgcagactttacggacatcgacaggttttcggacggcctggtctttgaaaactcgcatcttgattatgccagctttgtagaagccaggttgcggaaaaccgtttttcgcggctgcaagatgtatgaggggtacttcaatgacgccgacatggcggaatccgtttttgaccgctgtgacctggaacgggtttctttcgtcggaaccaatttggagaaagccgatttttcaacctctttcaacttttcgatcaatcccgccatgtgcaagctgaaaaaggcggtcttttcccggcatgggctggaagggctgctcgcccatctggacattgacatcaggggataggagcgcggccacggtttaactggaatacggaataggccgttatagcgggtaaaacaagaatgcgggcattcccgtttcaggaatgcccgcaccgtttcaacgcaggttagaatttggaattccgcttcttcacttcctctacgagtttggaaagggattttccctttttgcgcttatcatgttccgaagcggaaaagtattccgcttcccgccggagcttcagatagctttcataaacctcgcggtccagcaggccggtgttcactgcttccaggacggcgcatccgggctcatggatatgcccgcaattcttgaaacggcatgccgccgcgaagtcggaaatatccagcgcttctgcaagggaaccgggctggccgatcgccaggccgaattcccggacgcccggagtgtctattaaaacgcccgaaccgtccatcaataccatttcccggcgggtggacgtgtgccgtcctttgcccgtggaggagcttatatgggaggtggacaggaccggttttccgcacagcgcattcaccagggaacttttcccgacgcctgaggaaccgacaaacaccactgtttccccttccggaatggactcccgtagccgtagaatcgactggggttcatgaatgcttgtaaaaaatacaggcatccggcgctccaggtgtttgacctgttcttcaatgccctgcctgtcaaaccctagatcggccttgttcagcaccagtacgggtttgattccctcttccaatatctgaaccatgaaacgctcggctctgcggatattgaaattatcatccaggctctggacaatgaatgccttgtccacgtaagaggcgatggcctgcctgtcggaaaccgttccgcttttcttgcggtacagggtccgttcatggggcagcacatcgacgatgattcctttcgtttcatcaaagggctggaaaatcacccagtcgcccgtgcagggcagttcaaaggctggtttttcatacatcatgtttccccttaattcgcactggaacactccgttctccgccacgatctcataacacgtcctgtgcacgatggcgatgcggccatggggcagggcgctgtacgtagattcccgtttgagccggcttaacttctcattccagccgtaagcatttaaatgaatcattgttccatcttttttgcgatgtaaaacacgtagccgtagaattccttgtacctgcggtataattcctcttcatggcgcagggatgcgactaattccgcggcggcttcatttcccggatattgatgaaggaacatttcctgcacgggaacctgcggagcgtaataatgctccgtccagcagctttccggcagaatgaaggaagcgacaggcacgtacccggccctctgtatctgggctatcttattgggtatggtgtctatctccggatacatgtccatccagaagcggtgaatctcttccggacgttccgcggtaaaccacgagctttcggaaatggccaggtagcctcccggtttcaggaacttgcgccattcgttcagcccccgttcaaagccgatgttgtaaatggccccttccgaccagatcaggtccagttcttcttctgcaaaagggagcttgtccatggaaccgacgatgccttctaccctgtcctgcaagcctgactgcgttgcctggcggttgaagatgcggatgaaatccgggaacaggtcaagccccgtaacgcttccctgaacatgtgcggcaagcgtcctggtctgtccgcccgtgccgcagccgaggtcggcgatgcaggattgtccggtcagattgtcaatgaagccgagggccttgagggtagcctccgggctgccggggccctgccgttccaggcgcgagaaatattcgcagatgaaattgaaatcgaattcgtgaattgttttgtttttattactcattaatttagtaaatgttgtatgccatgagggcacggcacagcggcgccgtcatcgtggcagatagattaacgttgaaattccaataatacggaacttcctcccggaagggatcatccgggagcaaacaaaaggggacaaccgctacggaaagtaccggttgtttacaaggccgaggccgatttaaatgaagtattaaacatgaagcaaagatatatcgtcttgtgccggactggaaatgcgctgccgataagattgtttcagaagcaacttttccggtgcggcggggaacaggggtaaatccccgttcgcctcatatcttctctgtaatttgtatttccaatactttcccgaaagtatgcccgcgtacaggatgtgcgggccgtgccggaatttcgcacggtccggctgtctttttcaagacattattatgtctgctgttctccggagccggaaaaaacgtcattcccgcgcgtcggggatgcttcctctactccgtctttccgtacctgcgcgcccggaaggaataggccaccgccaccacggcggcgagtatggcgtacaggatgaagcggtccgtggagatggcgttggcggattctccgttggacaggaaaaaggtgatggcggccaccagcatgttgcctgcaaagatggtgaggttccagaagctggtgatgacgcttttcaaatgcagcggagcctgcgtgtaggcgaattcgaggccggtggtgctgagcaggatctcggaaatggtgagtacgcagtaggggatcaattgccacgcgatggacatggaggctcctccctccagcctgtattgcaggaaagcgacaatcaggaacgtcacggagctcagggccagccccgttccaaggcgcaccaggggccgcgccagcgtcaccaccttcggatagacgaatacggtgatcagtggaatgaacaccatcacgaaaatgggattggccgcctggatttgcgccggcccgatggaccagtctccgccgcccgggagcgggatggaaaggggaatcatcctgctgccctgggccacccaggaggaggccgtctgttcaaagatggaccagaagggaatgatgaagacaaagatggagaggattttcaggatgtgccgggcgtcctccacggcggaagctccgcagcgttgctccgcattcttccagcccccgtggaacaggacgatgaagagcactttccagaagccggcgcggccgttgttgcgttcaggcggcgttctgtggtacttcttgcggcccagccagaagacgaaggtggcgatgcccatgaaaatgcccggaacggcaaacgcccaactgtacccgtaatgctgttccatggccggaatgaccaggaaggagaagaaggagcccaggttgatagcccagtaaaaggcattgaaggccttggtcatcaactgcggggatttattcggaatctggtcccccatgaaggcggagacgcagggcttgatgcctcccgcgcccagcgcgatgatgaacaggcccgtcatcaggatgtaacggcgcgcttcaatggtatggaagaggtccgccgtggccaggactccgtgccctacgcagtaaagcagggaaatgtaaagaatggtcttgtaccggccccataccttgtccgccagccatgcgcccgccaggggaagcaggtaaaccattcccgcgaagacgtggagggtggcggtggcccagttttcgctcatcagcaggtggcccgtcatgtacagcatgaggatggacttcatgccgtagaagctgaagcgttcgcaggcttccgttccgatgatgtacctggactgggcagggagggcgctcatggatgatgaggggggagggggtcagggatggcggaacaagggcaataaaaatgatggccccggtgcgggggccatcataggaaggcattttggcggcattccgcccctgtgcggcgggacacgggggtaatgacggctgccatggaaaggaagggtgttagcgttcctggttcaggatgggggcgatctccaccttgtactgggcgatgcacgctttcagccagtccagcatgatcatggatttggcctgggcggtcagggccggggcaatctgctgggtggccttgatctggaactccggcgtatcctccagttcgcgcttgacgagctgggtcagcaggatgccgtcccccgtgttgatgggctgggccatccggccggggttaatgacggaaaccgcctggaatacttcttcagggaccgggagttccttgggcggagccaggcgggaattcatggcgcggtccagaagggcctggagttcttcctggcttctggcgttttggaggttgacgctgctcaggagggcgttcggattgatgaagggaccgtaggcggcggtcttggctccggccttcccggcgatggcgttgaactgttccacgggcttttcagccttctgcaattccgtgttgagttcggcggcggctttgttcatggattccacggtcatgctttccagcaggtcagcgcgggcgctgttgcgggcggtttcataaggcagcgcctttaccggggtaacgccttccaggcggaccaggacgacctgtccgttttccagcacctgcatggtgctgatctgttcggctccggtcttggcgcgcgcttcttcaatggccttggcgtccgcatccgcattcagggcgggggctcccgtcagggagaaggccacgtccagcagggtggcgctgcgtccgtcggaggcggactggttgatcggctggttgatttcctggggcgcattcttgcgcgtcacggccgtgtaggacttcttctccatcttgcagacgtcgggagtcttggccagggcttcactgatggcctggtccatgttcctgccgttggtggcgttcagcggttcccagatgtcattttccaccaggttcatggtttccatggtggcgttggaaatatcgccgggcttgggagcctgggcatcgcccgcgggggtgaaggtgtacacggtgaagaagcgggcttcctcgttcttgtaattttccttgtgcttgtcccagaaggttttgatttcctcttctcccgggtccgtcttgggacggaaggcgctcttttccaggaaggcggtgttgaccgtgatctgctggctgttggactccgccacggcttcggcaaagccggattccacggaaatgccgccggtcagcacatccttgatgcgcaccaggctgatggtgtcttccatcaggccgcgcagcagttcctcctgaagcttcttgcccatgttgccgcgcatggaaatgaaattgtcgtacttccgggggtcgaagacgcccttctcatcctggaattcgggaatgttgcagatggcgtcgtcaatctccgtagtattgggcgtcaggcccagccggctcgcctccctgcggatgatgccgcggtaggccaggaaagcggcgttgggattattcgttttcagcaggtggcagagttcccgcaggctttcttccgagctgaaattgtcctggagcagcgggccgaaggtggaagggaaggagaaagccacggacaggccggttctgcccatgctgttgtaatccttttctccgtaagacttgccgtccacggaaacgaaggtttgcttgaacatgccggtcagggagccgccgcttacgtccccgccgatgaacatgaggcccacaaacaccagggccatggctgccatgatgacgattgtatgtttacgtaagtaatctaacatggaatgttaagttgaagatgcgcgtgtggccggtcccggactgacggcagcctggacagcccggaccttttacaccttttcccgccgctaggcaagaacgaagctttccgcttccggcggcttttccaaaacattgcggcatgcgctttcctgtcatgaagggcgtttccggtcacggcagaacagtttttgacctcgacggtgatgcaaataccccttatgttgctcctgcgcggaaggttccggatgccgcagggcggtccggcctcgtggggcctgttccctcccgcgcatgtccgtagccggatgttcctttaatcgcaaggatttatgctgaaccaggtagtagaactcaaaagagaagtgacggcggtccagatccccagcggggatgtgctcacgctgccggagggggaacgcgtgtatatcacccagatactgggcggctcctataccgtggctacggaccatggcctggcccgcatctccagggaaaatgcggacgccctgggagcggaagcggcggaagcctccccggaggcggctgaactggatgaaaacgccacgcttgaagaacgggtatgggatacgctgaaatgcgtgtacgatccggaaatccccgtggacatcgtcaacctgggcctgatttacgacgtgaccgtcatcgagctggaaaacggcctgcatcacgtggcggtcaaaatgactcttacggcgcccggctgcggcatgggaccccatctggtgatggaggccaaggaccgcattgaagcgctggaaggcgtggaggccgcggatgtggaaatggtgtgggaccccccctggaaccaggacatggtcagtgaggaaggcaggatgaaactcggattgatctgactccatgccggtgacattgaaattatccgacgacgaggcgcgcgatctggcggaaatgctttccaccgccgccacggtggccgcctccaaccagcaggatggggcggaaggacgcctggtggcgtggggaaagctggtctcccggctgatggaggaactatccgccacgcccaaactgaagggccgcattgcctacgcggacgatctgggcggttacgccttcacccgggaatatgaggaaaacgcctttttccaggactgcctggacgagtaccgggacaacattttctgggcggacctggtgacgcgcatggcggacaaggccatcagcgaacacctggggccggagtactttgaaagcatgccggaggaggaacgccgccggacggcggaagccctggaaaaatccctgtggcaggaatgcgccaggtacggcattgaccggctgggtttcatccttcccccgtcggacggttaaaagggaaaattgttcaaggaatatccgtgaaccggatactgcctgaatggcggacggcccggactgcatgcgtggatgcgctggggatggctggcgcgtgcgtcgtgcgtttgcgtggctattgagcagatggacggcgtatttatcctgttccaggtttttggctggcacgcgttgcggaagcgccgcaagccctgcgtcagctgaaatgaaaaacgtccggcagggggtactggttttcaggataaaaagtccgctggcgctcagttttaccttgagggccgcggggggctgcggcaatccccggatgggcaggacaaatccgggcagtttccgcggaccgggaattgttcatgcgccgggccggagccttattcctccgggtcctccggcatgggaggggtggggctgcccaggtgttccgtctccttgggagtggagagcaccttgtaatacgcccatgcggcggcggtcaatacgccgccgatggaaacgatcatggttagccagccggtaagggacatgattatttgatgttctcctgaacgagcctggtgacgacttcatcaggctggacaggattggcatcctggggcaggggacggttctggaacagtttgaaatccgtcatttttgtttctccgcccgtctggagcagaacggaaccgttgggctggatgtctgccatgacgttggtggagggggtgggatcgccggtgaacgtcacgctggtgttggggtgccatttgccgtccttgtatgcgaagctggggccgaagaaggcgccgcgggctttcttggcggattcaaagttgcgcatgaagtcttccacgaatccgacggagaaggaaagttccttttccgaggaatgcgttttccatttggaaatgaggtcccaggacttgtccttgttgttgaagtagtagccgctgatttccttgaatttccccatctttttgacgcagacgaggaaacgcatgttttccccgacggtccagggatagtccacgaagctctggccgcccgttccttcgccgccgaagcggccggagcgcgcgttttcacccagctttaccagtttggtgcgctcttcttccggcacgctgttggggttgtccccatgggccaccgggtcccagatggaaaagatgatgacttttttaccgttggactgttcctgaaagccgatgtagccgtcgtcaaaattcatggcgcagaagtaggtgcccggaacggatgtcttggctttcacttcattgtacagggcgctcgcctgggccgggtggccctgctgcatgacatggacggaacggcactggcgttttgccagcagttccgggtcttcctgggcatgcaggagagtggttccggagaacagggcggcgcaaacgacggctgtggcggagaaaagacgcatggttttgaatgattgattgatggttggccgctctccgtccggagggatggaggctagcaaataattagtacgggctaattacgtttgccctgtgggaaatctcgcatggaaactgcacttttttcaagattttttcggcatgagcattccggagaaattcatgaaactgggggagaaccgcaagcctttacggcaaccggaattgcatatccggaaggacgcccccatgatgtggtcttccatttgtttgctttcgttcaatgcggctgattgattcctttaactgccgcaaaggcccgcggcgcttccggaatgaagaaggccgtcccgcgcggatgcgggaacggccttcgggatgatgaacgggaagtgtcgttctaccggatggggttcaggaagaggggcatcaggcctcccagcacgatgaagatggagaaggccgccagcatcactccggaaatgacgggaacctgtacggggtccgcgtcttctgcgggcttgtcccagtacatggagcggatgaccttgaagtagtaatagaagccggaggccgcgcagatgatcatgacggggagcatccagctcaggtacaggcccgtgttgatgacgtgcacgaaggagatcattttggcgaagaagccggccgtcagaggcacgcccgccagggaggcgaacatgatggtgatggccagggccagccggggattggtcttgcccaggccgcggaaggcggagatttcctcgctcccgcgctggatgcggatcatggcgagggcgaagaaggcgccgaaggtcatgaccaggtacacggccaggtagaacggggcgttcggggcaagccgcccatccacggtgccgatgaagaggggaaggatgaagccggcctgcgcgatggaggaataacccatcatgcgcttcaggttggtctgcggaatggcgcccaggttgcccaccagcagcgtagccgcagccatcagggccacgacgaattcaacggggggcaatgcggcgaagggagccagaatgatgttgagcagggcgaagccggccaccttggaggctacggaaaggaaagccgtcaccggagtgggtgcgccctggtatacgtccggaatccacaattgcatgggaaccgcgccgattttgaaggccgtgccgagcagcagcatggcgagggccaggtacatggcgggggccgtctggcccgccagcgcgtggctgacgatggctccgtcatagatgaaggttcccgtgacgccgaagtaccaggccaggccgaagacgaggaagcccgtgctgacggcgcccagaatcaggtacttgatgcccgcttccgtggagcccaggttccggcggaagtagcccaccatgatgaaggagctcagggtaagcacttctagggagacgaacagttccaccaggttggaggctttgcacagggaggtgatgcccacgcaggccagcaggggaaggatgtagaattcccccgtgccgtcctgggacttggagtcgttggaagagaggttgatgacggcccggaagtccacggacagcagcagggtgactgccgtggcgacaagcgccaggatgatgtagacgttgtcatagagtccccccatgtagaaggggagcatcgccagggcacccgccgcgccaatcagcccgaagacgaatttgggcgtctttttgcagaaggtctcggccaggggcataagcatcgccaggccggccaggatgaattccggaatatacgcttgcatgggtaaaagaagatcgggttaaacttggattgtattcggaaggggaatcaggagaagaactggagcaccagcgtggggaagaagccgaagaccgccagggtgatcgtcaggaagtagttggccgcccgttcggaaggcagcagttccgtggcgtaggctgcggccttggagaggtccccctggaagatgttgcggtaggccctcagcatgtacaccgcgccgatgaccaggccccagaggcacagaatggtggcgatctggacagggccaaagctgtcgttaaatccggcgaagccggagaagaagaccatgaattcccccgggaagttggcgaggccggggaggccgatggaggccatgcccgccaggccgaagacgaaggccatgcgcggcagtctggtgctcaggccgcccagggagttgatttccagcgtgccggtctgcttttcaatctgtccgcagagcaggaagagcagggcgatggtcaggccgtgggccagcatcagcagggcggcccctttcagcgcccaggggttggcttccgcggaaccggaggccaccagggcggcgaaggccaggaagatgtagcccatgtgcatcacggaggagttgcccaggagcagatccagcctcttctggttgacggttacgtagcctacccagatgacgttgcagacgagcaggacaaggaggatgttcgtccaggggaggaagccagtttccatcagcggctggaacatgaagagtccgtacaggccgaacttcttgagcacgcccgcatgcatcatcgccaccggagcgggggcggaggcatacgcgggggctgcccaggagtggaaggggaagagggaaatcagcgtgccgaacccggcgatcagcagggcgccgatgagttccgcgtgggcgagctcacggccgccggccatgaagtctttcaatccggagaaggtgaagcccgcctgcgtgccgatcatcagcagggcggccagcagcaccatggaggcaagccccaggtaaagcgtggctcgccaggccgtggtgcggcggtcgccgcgtccgtacaggccgatcatcacgaaggtggggatgagggccagctcatggaaggcgaagaaggagatgatgttgtcggacaggaaggccccggtggcgcccgcggaaatcagcagggcggagttgtaccaggaggcttcccctcccttgggcgggttggttcccagcacggtggcgaaggtcaccaggatggtcagcagcagcatcactttggccagggccggggccaaggtgagctggaggtccatcccttcaaagcgggaccagcaggaggagcagccgtcaaagctaaccagggcccagatgccgagggccagcgtcagcgcggcgctgagcagggctgtcgggcgtgcgggcgccttgcacagaccgatgagggccgtggcaatcagaggaatgagaacaagccagataagcatggtgtgtgattggttggtaggttagcaggaatagaagacggtgaagtagatgaccaggagcaggccgatgccgaagagggccgtgtaggcggccatgctgccggactggaggcggcgcagcagggacccgacggcggcggtcagccgcgccaggccgcccacgatgaggccggagatgatgaactggtccatgaagtcgatgatggcggccagggagccctggatgcccctgaccagcaccttgtcatagaaccagtcaatgtagaggcggttggcgagggcgcgggagacggcattgccggagagcttgtcggaggccggggagcccgcatagaagacggccgccagcaggatgccgagcaccagcgcgcccatggagacgtagaagggcatgccgatatggaagctttcggaaacgaacccgttgaagggcaccagcctgtcagccatgaagccgtagccggagatgagggccagcacggccagaatcagcaggggaaccagcatgaggccgcccacttccgtggcgtgttccgagctgtggctgcggctcttgccgaagaagaccacgaagatcacgcgcatcatgtagaaggtggtcagcagggccacgcccgcgccgatccagaagaagaccgggtttttgtgcagggcggcttccagaatggcttccttggagaagaagccggacgtgaacggaatggcgaccagcgccatggtcgcgatgatgaaggtaagggaggtcagcttcatgcgcttcatgatgccgcccattttccagatgtcctgttcatggtggcaggcgaagatgatggcgcccgcgcccaggaagagcagggccttgaaccaggcatgggtgaagaggtggaacatggccgcttccccggccagcaggcccagggccatgaccatgtagcccagctgggagagggtggagtaggccagcacgcgcttgatgtcattctgctgggtggccatgaaggcggcgatgacggccgtgacggcgccgatgacggcaatgacgttgcaggctagggcggggaaggcttccacgccgatggagtactggacgcgcaccatcatgtacaccccggcggccaccatggtggccgcatggatcagggcggagacgggggtggggccttccatggcgtccggaagccacacgtgcagcgggaactgggcggatttgcccaccgccccgcagaagaggcacagcaccgtgatgttcagcagggtttcactgaggcccgcgggcatttccatcaggctgaagtccagcgtgttggtcagcgcccagagggtcaggatgccgatcaggaagccgaagtcccccacgcggttgcagatgaaggcctttttggcagcgtttgcggcggcgtccctggtgtaccagtggccgatgagcaggtaggaggaaaggcccaccagctcccagaagatgaaggtcatggcgatgttgttcgccaggacgatgcccgtcatggagaacatgaagaggctcaggcttgcgaagtagcgcgttttcgccttgtcgtccgccatgtagctcagggagaagatgtggaccagcaggccgatgcccgtgaccaccagcatcatgcgggtggaaagggggtccagcacaaagcccaggtcaacggaaaagacgtcggagatcggaagccaggagaaggagtccgagccggtctggtccagcaggcccagggaaagaacgaaggtcgccaggcaggagaaggtggaggtgagggccgcgacgttcggacgccgggtcagcaggaaccagttgaaggcggctacgaccagcggcaggaagagcaggagccaggtgtattgaatatcaatattaaacatgttcttgaagtggtatgttgctcttagtctttcagcgtgttgaggtcctgcgtgctggccgtgcgcctggcccggtacagggagacgatgagggccagcccgatggctacttccgccgcggcgatggtcaggatgaagatggagagggcctgtccgtcgtaattgggcagccccatggtgccctgggcgcgtgaaaacgccaccagtgacaggttggccgcgctgagcatcatttccaggcacatgaagatgacgatgatgtcacgccggacaatcacccccatcaggccgatggcgaacaggacgccggagaggatcaggtaatgcgtaagaggtatcatgatgatggctgtggtaaggggttcgggttatttgccgaaggggcggcggctcagcacgacgacgccgatggaggccaccagcagggccagcccggcgatgaccaggctccggttgtatttgtcaaacagggtgcggcccagcagggcggtatccgggaattccccgttgtctatttccgcgcggatggtggtgccttccggatagaggtgtgcggaacattggggggagaggggagggagggtgatggacggtgctatgccgcaggtggaatggagcaattggtcaagagatgtcttggtgatggcatagtccgatcctcgtgtgcatccgccggaagcaacgcagggtttctgcgcgcattccccggaaaggttgttggtttccgttttcccggaattggcgctgtcctggccgatcttcagatcgttccacgcctgttccgcggtggccatcgggcagcggtgcgtttccttcgcgccgggcagggagtagatgatgccgatgagctggccgaggaagaggccggcgatgatgacgccgatggcgacggagacgggccgccggaagggggaggtttcccgcttcacgttcagcagcatgatgatgaacgcgaagagcaccatgatggctccggcgtataccagaatctggagaatgcccaggaagtgggcgcccagcccgatcatgacggcggccgtggctccgaaggagagggccatcatcatggcggaggaaacggggttgcgcatgaagacgaccatcagggacaggatcacggccagggccccgaagacgtaaaagagtatgtcactggcaaaaatgttcataacgtacggaaattggagtgaatgtttcggggtgatttatttgtattggttccacttgttgaccagtcccttgcgggtgccccccatttcgtagagcttggccttgttgtggatggcctgggccttgtccgtgggggtgaacaggtagtcctggctcatgaagatggcctgttccgggcaggcttcctcgcacatgccgcagtagatgcagcggagcatgtcgatctggaattccctgggcgctttttccaccttgccccaggggccttccttgatggcgccgggggtgatggtgatggcgcgggcagggcagatgaattcgcagagctggcaggacacgcagcgttcgcggccgtcttcccccttcaccaggacgggagccccgcggtagtattccggcaggtgcttgtcccaccggaattccgggtactgcatcgtgacgcctatgccggagccggccagttccttcttgttgcgggatttgcccagcagagccagaacgaggtgcttgatggtgatccagagaccgccaaggatggattgcaagtagaaccgctctccgagggaaatcttcgggcgcttgatcgttttgaaggccataatagtgatgttgtcgggatgaagaaggttgattacttgacgaagtacaggatggcggccgtgatgaagatgttgatgacggccagttcaaagaagaccatccagccgagcttcatcacctggtcgtaacggaagcgggggagcgtccagcgcacccagacgaagaagaagacgaagaagaggagcttgagcacgtacgcgatgagctggcagatgaccgccacccagttggctacgtgttcgttgagccacccgtccaggccgaagccgatggaccagccgcccaggaacagcgtgatgaccagggaggagcctaccaccatggcggcgtattcacccatgaagaactgcgcgaatttcatggaggagtattccgtgtggtagccgcccacgaggtccgtttcacattcggacatgtcaaagggcgtgcggttggcttccgcgaagatggaggtcaggaagatgatgaagctgatggcgatgggaaccagcaggatccagcgctgccagctcaggccctcgccccacacgggaagcagcagccatccgttggcggcctggtattccacgatgttggagaggtccagcgtgctgtaaatcatcagcacggggatgatggacaggcccatgctgatttcgtaggagatcatctgggcggaggaacgcacgccgcccaggaaggggaatttggagttggaggaccatccggccagcaccaggccgtatacggagagggaggagatggcgaacatccacaggggccctacgctgaggttggccaccgccatgtttacgttgccgtaggaggtgtgaaggtctccggcaaaggggaccacggccgccgtcatcagcgggggggccagcaccaggatgggggcgatccagaagtacacgcggcgcacgaagggaggcgtgaagtcctgcttgaggaacagcttgccgccgtccaccatgggctgcacgaggccgaagatcggaatgtcgcggtccaggcggaagaagcggcacaggttggcgattttgccgtcgtggggaaggccgaagtagtccagcgtctttttaaacggcaggtctgacttcgccccgaagcggcggaagatgctcagcgggatgccggcgcggttgggccccacgcggtcctgaatccaggcggccacccggcgttcaatgtacacgcagaccggaatgaacaggatggtgatggcgaagcagatgacgattttgatcagcagggtgatgacgtagaaccacacagggttgctgagcacttcgtcgcaaaaggttagaatcgaatcaatcatggcggattaacaggttgtgtgcgtgtgaagtgtgattagcggccctggcttttttcatgttccaccacgggaatggtgacgccggtttccagaatgggctggcccccgtctcctatggagccccaggtgacgccgttaagggcgccgtattccgtgctcatgacggtgaggatgtccagggcggagttgaagtctttcagcgcggggttgccgcccagcagaagggtgatgtcccggagaatctgccagtcatccctggcgtagcccacgggctggatggcgcggttcaggcgctggatgcggcccgtgacgttgatcatcgttccgaatttttcagcatacgtgacgcctggcagaaccaggtccgcgtggcgcgccgtttcattcacgctgtgggcggtcatgaacaggtaatccagctttttcaggtcttccgccgtgaagccggcttccggggcggtgaggtcttcccccagcgtgaggatgcccttgatggagccgttgcgcacgccgtcgcggatggcggccagcctggagccgggttcaatgcccagcaccagcttggccccgttcgtgttcgggttgcggtccgcggcaatcagcatgccgtcgctttctcccatgcgggggacgatgtccaccatgtccgtgccgatttgcgcggccaggtggcggaccatgtaaagttcttcgttggtcatgcgcccggaggcgatgatggcgagctggtgcggggagacgcgcttgacggcttccgtgacggaggccagggcgggttcccaggtggacgggcggtggggcgctcccgcgtccgtgcgtatgacgggctggggaatgcgcgtttccgcgttgatgtatttgtaattcaggcggtgggagtccggcatccagcaggagttcacggcgtcgttcgggcgcggggtgatgcggtacaccttgtcttcacgcgtccagaggatgatgttggtgcccgtgccgcagtccacgtcaatggtcttggtttccttcaggaaccagacgcgcatcttgaagcggaagtccttggaggtaagagcgcctaccgggcagaggtccacggtgttcagggagtagttgctgtccagctcacggcccggatagaccgtgatggcgttgaaggtgccgcgctgggccatcgtgagaacttcgtcatgcatgatgtcgcgcatgaagcgcacgcagcggccgcagagcacgcagcgctcctggtccaggttcacgcgcgggccgatgctcaggttcttgcccttcttggtcttcttttcctcatagcggccttccacttggccgtagtcgttggagtattcctggagcttgcattccccggcctggtcgcagatgggacagtccagcgggtggctggtaagcaggaattccatcacgccgcggcgcgcctcgctggcgagggggctgtccgtacggatgcccatgttttccgccaccgtgttcgcgcaggagatgatggggcgcggcatccactggatgcgctggtagccgttttcatcataggagggagtctggcccggagccagccggggcggcatcccctgttccaccatgcacatgcggcaggagccgacgacggccaacttggggtggtagcagaagcacgggatgggaacgcctacggaacggcaggcgtctgcaatccgcgtgccgcgcgggaaccggtgccacgttccgttgatctggacgttcaccttgccttcctcggcggcaatgtctttggggagtttggaagcttcttcactcatgatgacggatgggagggaaatggtattgaaaagtggtgttgcgttctgctgttagcgggtgaggaaacgggtttgttcccggccttccctggtatggggcaggcaggcgttgaaagggtccgtcagggccacgaattcctccttgaacttggagaccatggcctgggtgggccatgaggcggcttcaccgaaggcgcagaccgttttcccttcaatctggttggccacttcaatcagcaggtccacgtcggacggagcggccttgccttccagaatgcgggtgctgagcttcatcatccacgggcagccttcccggcagggggtgcactggccgcaggattcatgcgcgtaaaagcggttgatgttgttcatggcccagggcatggagcgggagtcgtccatgacgatgaccgcgccggagccggacatggagccgtgctgggagatgctgtccaggtccagcggaatgtcgaagaaggagattttgcccatggtgccgtccgggttctgcaccttgtattccacgtccgtgcgcatgaccttggaggaggagccgccgggaatgacggccttgaactcgcggccgtcccgcgggcctccgcagacgtcatacagcagttcgccgaaggtcatggagccggaaacgatttcatagaaccccgggcgtttcacgtcgccggaaacgccgatgatgcgggtaccgggggagcgccgggcaccttcctggctgtaggcttctccgcccatggcgatgacgtgcttcacctggcagagggattccacgttgttcacgatggtggggcagccgtacaggccgatggcggccgggaagaagggaggcttgatgcgcgggtaggggcgctggccttccagggagttgagcagggccgtttcctcaccgcagatgtaggcgcccgcgccgcggtgcacgtggatttccagatcgtagccggaaccctggatgttgctgcccaggaagccgcgttcgcgcgcttcctgaagggccttgagcatgatttccgcggccatggggaattcctcccgcatgtagatgtaagccaggtgcgcgcctaccgcgtagctggagatgaccatcccttcaatgagctggtgggggtcctggtggacgatgtagcggtccttgaaggtgccgggttcggattcgtcgcagttgcagaccaggtaaacgggcttcgtgttgttcggcggaatgaaggtccacttcacgcctgtggggaaacccgcgccgccgcggccgcgcagtccggattttttcacctcgtcaatgacggccttcggctccatgccgagcgcctttttcagttcctcatagccgccgtcggccagatagcagtcaatggaagtgttccatccttcgcggttgacgtttttcaggatgcggcgcgtttccctggggtggggttctttaccgggaagataggtgatgctcatggcgaaaatctggtgcggggtggaaagggttaggcgttctggtgcttggcgatcacttcctccagcagttccggagtgactttttcatacagaaggtcgttgaccatcatgttggggccgaatccgcagttggccaggcattccactccctccacgctccacaggccgtccgggctgacgccgatggggtggtggtggtcaatgccgctcttgtcaatgcccaggcgcgcgcagatggcgtcaaagaggctgtccgctcccgccatggcgcaggagagggtgcggcacacgcggatgtgggtcttgccggggcacatctggcgcaggccgggatagaaggtgaccacacccagcacgtgggcggcggagatgttcagtttttcacccacccaggtgatggcgtctgcgctgatgaagccgaattttttctggatttcatgcaggatgggaagcacggcggatttctgcttgccttccggataatgcgtgacgtattcgctggcggcggcgtcaagctccggcgttacttcaaaggccgggtagaaccgttcgcccgggctgggctggtgggcgatagtcgcgtcgatggcgttttcagcgtaatcggacatggggaggaaatttggtgtttgagttggaaaggaaaagggaagcgtgtgtttagcggtcgcattcgcccatcacgaagtcgaaggagccgagaatggccggaacgtcggaaaccaggtggcctttcagcagttccggcaggatggacaggttgcagaaggagggggagcgcatgcgcaggcggttgggaaggccgccgcccttggagtccaggaagaagcccagctcgcccttcgggttttccgcggcaaagtaaacctgcccggcgggggcgttcacgcccatggtggtggccatgaactggcggatcagggattccatgtccgtcatgacctttttcttttcaggcagcgtgcccttggtgtccaccatgttgatggggccgtccggcatggtttcaatgacctggcggatgatgcgcagggactggcgcatttcttcgatgcgcacggtaaagcggtcgtaacagtcgccgtgttcacccacgggaacgtcgaactcgtaattctcataacccaggtaggggttggttttgcgcaggtcgcgcttgacgccgctggcgcgcaggttggctccggtaatggcccaggagagcgccttttcacggctgatgacgcccacgccctgaaggcggtcgatgaagattttgttcttgagcagcagggcttccgtttcatccagggtcttgcccgcttcgtcacagaagacgagcacttccttcagcatttcattggggacgtcgcgcgtctgtccgccgatgcgggtgtaggaggaggtgaagcgcgctccggtgagctgttcgtaaaagttatggattttttcgcgttcctcataacagtacaggaacacggtcatggcgcctacgtccatgccgtacacgccgacgcccaggatatgggaggaaaaacgggaaagctccagggccagcacgcgcagggcctgcccgcggggcggcagctcccagcccagcagtttttccaccgcgcaggcataggcgatgttgttggaaagaggggccaggtagtcgaagcggtcggtgtaggggacgaactggttgtactggatggtctccccgattttttccatgccgcggtgcaggtggcccaccaccggatcgcagctaatgatctcttcaccatcgagttccagcaccagccgcagcacgccgtgggtggcggggtgggaggggcccacgttcagggtcatcgtttctccgagcggttcggaagtattggtgagatagtctgcgttagcggctgtatctgcaatggcgaaagttttagtgctcgtcttcatgtggatgtccgtgcctggctgaacctgataatggtgccgaatgattatgccacttcacaccatgcgggcaagccaaatgtcagtttttttggcattccgggggagctttccacgttgatgcggaagtctcctcaacttatgaatgttaggctattctaacattgagcccccatgtgggagaggaggaatgggaggaggaatgcatttggaatcccatgccgtctgcaacggcaggaaaaacatgaaccggggatatatttttctgtccggaggaccccatgtccgggaagagagggcggcggattttccggcataaaacttttccgcaggagaacggagagggtgttaatgattttctccattttctcacgttttgcaaaagatgcggcttctggccgcatatgctctcagctgccgcaagagcttgcagcgctcccttcaatttgctggaaagagccctggtttctcaggggttttgagacttgcgggtttttaggagctttttccgccacattgcggagggagagtgccatctctttttccgttcggagtttttacaaggggccggagacccttgttcccaggaaggagtttatggcggaaaacacgggtatgaagtttccggttgcccgtttacccgcgctccggagggacgatggctgcgacagcagccggaattatttgactacattctggggaatgaagtgcatttcctgctccgcgatgccgaattgccaggtggctgtctgccacaggttggcggcaaggtttttccagcgcacctggacggttacggggctgaggcgcagggggcgggaaggcgtccatttcaggattttttccttggggtcatactgggcattcaccaggccgaagccggaaacgcgcatttccacctgtttgggatcgaaggctggttcacgggccagggaaatggagatgtccgggttctggtttttcaccacggtattggccgccgggtagacaggctgggccggggccggataggaattcaggctgttcccgctgctgctattgttgccgggagtggccgacggcgtttccggagccgtgggcacgttgaaattcagggctctggtgaatgtcttgggatccttgccaaaaaccatgtagcggtgaacccgccagcggtccgtgtccttggttactttcttgggaatcaccgtgaaggccgcctggaatccggcttcctccgccttggtgatcatgtccggcaggacgaatccgcccgggtagcagtaggcttccacggcggaaccggggaatttttcctgaaggattttccgggaattgcttatttccgccgtagccaggtccagaaccgcctgggttcccttccgctgggcggcgcgccatgatctggggtacaggtggctgacggagtggctgcccagcgtggcgccgttatccagcatttcctggatttggtcatggctcatggcggagccgcggcccgtgatgaatttggtataggggaaaacggtgaacgggaatcccgtttccttcaggatggggtaggcatccgtgtaaacgctcttccagccgtcgtcaatggtgatcatcacgcatttggcggggagctgcctgcttcccagtttccattccaggaattccttcatggaaatgacgggcacgccgctggccttcagggcctgcatctgggcgcggaacacgtccgtattcatgcgcatttccgtggcgggaagggtacggctgaaatcatgatagcccaggatggcaacgcgggtttcatgctggggaaccggaacgggggaaaaggccgtgggaggaatgaccgggaccgggcctgcgggctgcaccggggcatgcaggttcgtttccccgggaataggctccgcattcgggatgggctccgcctgggggatggaggaaaccgtttctccgggaatgggttccgccatgggaatgttttcattcctgcggttggcttcaatcagttccctgacggggacaacgccggcggcagggttccccttgatagtgccgccgatgaccggtccgggcgcgaggggaaggggagtggcgggcggcaggtcgggcggaagctccgcgcacgcgacaccggctgcaatcaagaaaatggaaaggaggcctggggcggagcgcatacctgcaactactatttttaagtttcctgttcaaccttaaactcaggcaggcatgacagccttttccctgccgtgcgcgctccttttcaggtccgtgcgggcttttcccgcctgaacgcgttcccgttaaaaagcatacagactcattttcagctcgcggaagaaaggggaggtgtttagtctgtccgcagacatgagctgtatttgtcatttcttcaaagttctggcgcgccgtgcgggtctgctcactaccgtggctgccgccgcctttttcctgggggctcctgccggtgaagcttcagctcgcgcggcggaacctgcctatcccgctacggaagtggggggggaatcacagtacagccattttcccattcccctgaaccagtacaagcccgcgccgccggatgccagcctgtcccaggtgctcacggagcgcaacaagcagtccggcgggttcaacctggccgtgacgctcgtgttcctgggggctattatccatacgttcctggccgggcggtttgaacgctattcccacaagctggccctgcgctacaaggaaaagctcaaggaaaccaacttccgcgtgatgcacccggaggagcgtcttccggtctccttcgcgtccgccatcttccatttcctgggggaagtggaagccgtgttcggcatctggatcatccccttcatgttcgtgtgctggaagtattattcctttgaggacttctcggcctacttgaattacgactgctccttcacggagcccatgttcgtgatgattatcatgatcatcgcctcttcccgccccatcttcaagctggcggaatccgtagtcaactacggcgccaaacttggaaaatcttcgcccggggcctggtggatttccgtgatgacccttgcccccctgctcggctccctgattacggaacctgccgccatgacgatcggcgccctgatcctgagcaagaagttttacgacctcaagccgaagaagaccctgatgtatgcaacgctggggctgctttttgtgaatatttccatcgggggcaccctgacgcattttgccgccccccccgtggtgatggtggcggaaaagtgggactggggtcttgcgcacatgatccagcacttcggctggaaggccgtttcagccatcatcatttccaacctggcctactttttcctcttccgcaaggaattcgcccgcctggccgcccagcaacgcgagttcaacgagtttgacgacgccgttccccagtcctgggaagaccgcaatgacaagataccggcgtgggtgacgctggcgcacgtctgctttctgacctggacggttctcttcgcccatgagccggtcatgttcatcggcagcttcctcttcttcattggctttacggtggctaccccgcagtaccagaaccagatgtccctgcgcgttcccatgatggtgggcttcttcctggcgggcctggtcattctgggcggcgtccaggcctggtggctggaaccggtgctgacgcggctgggggactacgccatgatcggggccacgctgctgacagcgttcaacgacaatgccgccgtcaccttcctggcgtccacggttcccaacctgccggaagccgtcaagtattccgtggtggccggcgccgtgacgggcggcggcctgacggtaatcgccaacgcccccaacccggcggggcaggccattctgggcaagtacttcaagggcatcaatcccctgtggctgtttgcctgggcggcttttcccaccgccatcgtgttcatcttcttcacctgcttcggccattaagggccggaaccggagcttactcttatgtttaccggactcgttgaaacaacaggaaccgtggaagggtttacgcccatcaacggcggagccagactgacgctgattattccattcggccatgaactttccctgggggattccgtcgccgtcaacggttgctgcctgacggtggacgccctggacggtgagcgcgtctcctttgacctgctttcccagaccctccgcgtcaccagcctgggaaacctccagccgggggggctggtgaacctggaacgcgccatgtccgccatggaccgcttcggcggccacttcgtgatggggcatgtggacaataccggaactattacggccctggagcccgtggggcaggaccaccgcctggaagtgcgcattccggatgaactggcccgctactgcattgacaagggctccatcaccattgacggcatttccctgacgattgcgaatttgaacggctccctgcttgaattctggatcacgccccataccttcggacgcacgaacctgcaacgcgccgttcccggccagccggtgaacctggaagtggacatgctggccaagtatgtggaaaaactgttcgcctcccggggaaatacaagaatatcgttctagaataaattaatttacggaattatatagaataatcttgtaacgtcgtttttcttttctgccgatggtatttgaatgacagctacagaagaatgttggtcggagcaagattaaagtaaataattctgttaatttatttctgagattaacttctctactcccctgataagatccataacttcatcaggagtaggttctctttctttagaatgagcgctcatatttctaatatctccgagcctttgtattaatctccaagttgggagatcaatgatttctaatttttttaattcttcattaaaatcagatattgttggattttgtttccggaatataatgttatgaaatttacacacttttaataaatgagtttcgagagttactcctgctagtactccagctgcccttatgtactttttattaagtaaattttgtgcagcttgcaactcattttcaaagagttcatattgtaacaattcttcaatattttctaatttagaatctataagttttaaacaagcttctaatattgaaatttgtatagacatttttgaagaaaatatactaatacgatctacaatttcctctgatccttttttaacgactaatcctaaaaaataatcacttattgtatatgttaaagaatcgatactttttcttttttctgttttatataaatcgtaaaattcctgatgtctatcaggtaatatctgccgtacgatattgtaggattttgtaaaccaatcttgataggaggaaagcagcgagagatttttgtttttgtattcttgatagctcggtttattttttattatattttctgtttctttaggaatctttttatatttaatggcttcgtctataagaatcatgttgccgtattcatatagatattctaattcacgttttatatgttctttgctttttgacataaattatattaaaatgattaagttgattaaagggaacctttagccgtgacccatttgccgcgtttgatgacccgatcaaaggaaaggccgtgatgttccgctgccgccttcgtttcttcccactgggaggccagaatcccggaaatgaccagcacggcatccttcttcatcgccgcgatgatatggggaaaagccttttgcagaatggtggaaaacaggttggcgacgaccaggttgcccttctgccgggctgcgggcgtccattcaaagacgtcccctacaaataaatccagctgttccgccgtgacggcattgcgttccatgttgtgacgggccacttcaaccgccatggggtcaaagtcgaaggccgtggcgtgttccgcccccagcttcagcgccgcaatcgccagtacggcggttccgcagccgatgtccgtcatggtccaggctgtttctttgcgtgattgggcgaagtcggcaatgaagcgcaggcaggtggacgtggtggcatggtctccggtgccgaaggccatttccgccggaacgctcaggatccggcgtccggggaattgttgttgcagggcggcaagcttttctgcggagctctgttccgtgatgaccagggaattccttatcctgagcggggcgcgttcctcccggttctgggccgccacccagtcacgtgtcttgatttcccggacagtgccgccaaaatactgcttcagggtcagggcgtcttcttcccggtcacagtaaacggtaatcctgatggtcttgcctcccttgatgatggtgatggaggcattgggatttccggcaatgcgctcactccacgcgtcttcccatttggcgggggacagtttgttccagctccaggtcatgcggggagtatggaagcttttccggcaggaggcaaggacggatgcaacggaaggaaaagttgaagaaagctgcaatgggttatccattccagggggttattcccataaaggccatgaagcggcgcaggggcttgcggcgctccggaaactggccggaacttacagggattttccgttgggccacatcagcatccgtttcaggaagcgttcattgttgacggtgaccttcgggaagaggcgcctgctggattccttgagcgccctgatggcgtcttcgccctgcagcggcgtgcggtccgaaccgccgatgacggcgcgcagccatgcggtctggggcatgtcataagcttccacggctttgaagggcatgcgttcacgccagttggcgcctcccgtggtgccgggaatgttcaggcgcttgttgacgtcaaagagggcgggccagaggatggccgcgtaacgggagttggaacggaacagggcattgtacatggccgtcttgatttccaggttccagcaggagagccatgtttccggctgcatgccggcgaagtccgcaaaccatttcagcaggcgcgctccgtcttccgcctggtgcacaatgctttcctgctccgggccggacggcgttttgggagaggtgccgtcccacaggcccagtttctgcgcacgctcaatcttggcgtagctgtcattccaggtctgcatgatggtttcaaagtcatgcgtgccgaacgccgcaaaggagcattcatggtattcctttccgggggtgatggtgccgtccgtcctgatttcccagtggggtatcttgaagccgggaatgttaagctggcgcatgttcgggcgcacgtaatccggcacgcagcccaggtcttcccccaccacgctgaccccgggggcggcggagagcaggaggcgcaggtacaggtctccgtccgtcaggttcaggttgcggtccacggcgttgtcatccccgcggggcttgaagccgggaagcctgccgcccgtcctctgggccgcctgctcaagggtaagaggcaggaaaacctcgttttccgtgggtttccacgggaaggagtaaatgcggtaaaaacccaggatgtggtcaatcctgtacatgctgaaaatcttggtgcagtatttcacccggcgtctccaccaggcaaagttgtcctgggccatgacgtcccatttgtacaggggaatgccccagttctgcccccattttcccgtgaacgggtcctccgcgtaattgccttccgccggggcaccgccgcaccagtccgtatcaaacaggtagcgttcaaagaagacgtccgcgctgctcagggaaacgccgatggggatgtcccccatcagtttcacgttgcgttcgtccgcgtaaatccggatgaattcccactgcttttcacagagccattgaagccagcgggtgaagtccttttcctcctcgtaatcggcggcgatggccttggcccgtgcggggtcctgttccggccagtgccaccagatttccgtgccgaacaggtcacagaggacctggaagcaggcaaagtcttccagccagcttccctgttccctcacccattcccggaacttgggcatgatgccttcatattccggcttggtcttaaaattgttccatgcatcccgcagaatccacattttccagaacctgaccttggggtagtccaccaggttggggccggagggctgttcccacggcagcgtatccccggtttcattgaagacgcgttcttccaggccgggaatggtccagggttccagggaaaggtacaggggctccagagcgatggagctgatggcggaatagggggaagggcattcgtcccgccccagggcattgacgggcaggagctggagaaatcccacgtgggcgtccgccgcccagtcaatccactggcgcagggccgtcaggtccccgatgccgtggtcgttgttgcggcgcagggagaacaatggcagaactacgccggctaatctcttttcatccatatcagaacgcatgcttgaacggtttcccggatggacctgtgccagccgtggaaaccgtgagaggcagaatagcattccccggaggaatgcggcaagcctaatacgttgcctttgcgccatgattcggggttggcgcaggaaaaacgcgcggtagttttcccgcctgtccggcatgaatggaaggcgcttggacaggaaagacaggatttttctttttgaaatggcatcctgaataaacaggcgcaaattctgcttccatccgcaatctgtgccagttaaaatcatacgcaaatgaaattggcacttctcccttccgccctgctggcgcttctggcttcctgcggtcccaacaagcatatgaatgcctgggagcggcagagttcggcgctggatcccgtgggcatcacgtccaagaaaatggcggccaaacacagggcggaccaggcgtcttacaagccgggggaatccgtcacgttcaagaaggaaaagttgatggtgttcgaacagaatccggagaataatttttccacgagcggaaccgtcaaggggggcgtgaaaacagccaaggtgctggtttgcggagatttgttcgccaaggttgaatttgaggacggcagccagggatacgtgagcctgtcagaagtagtcaatccgcaggaaatgatgggcttttatcccgtcaccgctcccgacatggcagggccggacggggccctgcttccgctgcccgccaatatgggcgccgtcagcccggaagccgcagcggcttcccgtgagctggatatgtcccgcatgaacacctccctggttcctgtgccggactccgcttccccgtcaccttcgggagccgcgccgcaggaagcccctccggtcagtgcgcctctcccggaatcaagcgtgaaacaataagcgcctttggcgcagatgccggggagcagggatgggacgatatatttcggctcgcgccgtgctggtttccctgaatcctgtttcctccctgcctgaccaatggcggcagcctattccgccgtcagttcatacgccacggcatccgttacggtgacggtggcgaattcgccgacaggcagcgtcagggggacggaaacggtgccgtcgatgtccggggcgtcccattccgttctggcaacgccgggagcgtccaccagcacgcggattttcctgccgatctgttcctggcccgtttccgaggcaaggcgggtcaggagcatggtggcttcattgtagcggcgcgccttggtgcggtggtgcacctggttcggcatcttgtaggccttcgtgccttcctcccgtgagaaggtgaagatgccggcccgttcaaagcggaactcctcaatgaactccatcaattcctgatggtcgtcctccgtctctccggggaatccggtgatgaaggtggtgcggatggcgattcccggaacggccttccggatgtcccgcaggaggttgcggatgtagtccccgtccgtcacgcgctgcatggcgctgagcatgttgccggaaatgtgctgaagggggatgtccacgtagcgggccaccttggggctttccgcgatggcggcggtcagttcgtcgctccagtgggcggggtgggtgtaaagaagcctgatccagaattccccttcaatggcgttcagggcgcggatcagggaggccagggattccccgcgggaggagtccaccgcgctgcggcggttcgggcgcgcatccgtccatttgtccatgccgtagtaggtaatgtcctgcgcaatgaggcagatttccttcacgccggaccggatgagggcttccgcttcacgcaccacgtcctgctgggagcggctgcggtggcgtccccggatcatcgggatgatgcagtaggcgcaaccgtggttgcagccttccgctatcttgatgtaggccgtatgcgggggagtaaggcggtagcgcggcgtgtcccagtccggaacatacttgcacttgccttcaataaaatttttatccggagcggtccgctccatcaccttcgtgatgatttccgggagtttggtgacctggtccgggccgatgaaggcgtccacctccggcagcagggcgggcagttccttctggaagcgctgggacaggcagcccgctacaatcagcttctggttttccggataagctccgctctcccgggcgcgcacgacgtccagaatggcgtcgatggcttcctgcttggcctggtcaatgaaagcgcaggtgttgactaccatcacgtccgccagctcaggttccggagtcatggtcatgccggccttctgcatgtggccgatcatgatttcagagtcaatcaggttcttggggcagcccagggaaataagtccaacggtgagaggcatggcagtgagtgaaaagcgtgatggcgtcagtccccggagggggagtcgtccctgacgacgacgaggtcgaacggacggatgtccacgacgcgcacaggggtacccttaatgagtatgccttgtcgagagaaaacctcgcatatttcgccatggatcatggccttgccgttgggcttcagctccgtgacggcgttcccccggtcgcctacctgcacgcgcgcaatgttgacggcttccccggcggggccgccgctgaccgtggcgttcgtgacgcggcgcatcaggacggagtccggcaggtacttcatcagcacggcgatcaggatggcgcccccggtcaggcccagggccagtttcaggagggggatgcccaggaccatcgccagcgtgttgacgtcgtcccactgtccgttccggatgatgtggtcccattcccaggagctgatcatgccgccgaacagggccaggaagatgcagataccgcccgcaatggccgcaatgaaggtgcccgggatgacgaagaattccacgcacagcaggaccacgcccagaatgagcagggccgccgtttcatacccggccaggttcccagcgatgttgttgccgaagaagaacagggcaaacgcggcaatggccacgatgccgccgatgccgaacccaggcgtcttgaatcccatgtagatgccgccgattcccagcaggatcagtatgggggaggcccacgcaatccagaggccgatgcgttcaaaggcggtgggttccgccgtgaccgtgggggcgtccaccttctcctgggccagcaggtccgtgacggaggtggccgttccctgggccagcaggggcctgccgtcttccagccgcgtggcggcctccttgcccgtcagggtcaggagcgcgcctttttccagcttgacggggccgaattgctgctcctggtcggaggggatcatcatggccttcactacttccgggcggtagcccttttccgttaccacggagcgggtgaaggcccagaaggcgctttccgccttcttgcgcatgacggggtccatctcctccccggaggaggtgatgatgcccgccgcgccgatggaggagacgggcgccatgtaaatcttgtcgcacgccgcggagatgagcgccccggcggacatggccttgggattcacgtaggcgtaagtggggatggtcagcggctggatgcttttcatcatcatctcgctggtttcccaggccaggccgccgggcgtgttcaggtcaaacaccacggcgcgcgcctgttcctcctgcgcccgcttcaggatgcggttcatgaagccgaagctctgcttgctggtcagggagtcctcccccaccggaatgaccactacccggtcgcggaaggattcctccgcggccgcccggaacggggagccggcgaacagggccagcagagccagcaacagaaggtgaatgtgcttcatgcagacaggctaacacgttccgcgcccgcgctcaatggggaaatgcgttccgtgcggacggggaggccggatgccgccgcgccgtttcacccggttttcctgagggaacacgggagctcctctgtttttccagtgcgcgcccggttgtttcctccccctgttttcctgtgaatggcgtcctgattctgtcttcttgtgcacccggcggggctgtgatagactggccgcgccttatgggaaggattgatgaagacagcatccggcgcgttctggaagccactgacattgtagatgtggtgggttcctatctttccctgaaaagggccgggtcccggtggaaggcgtgctgcccgttccataatgagaagacgccttccttcatcgtggaccagacccggcagaacttcaaatgcttcggctgcggggaagggggatccgccatcaccttcgtgatgaagatggaaaacctgggctttgcggataccgtgcggcggctggcggaaaaagccggcattaccctggtggaggaagtgtatgacgccgcggaggaaaagcggcgcaaggcgcgcacggccctgctggtggcccataagaaggcggccgagttttttcacaggctcctgctccgctccccgaaggcggcggaggccagggcctacctgaattcccgcggatacggggcggacatggcgaagcgctggcaggtgggctgggctcctgattcttcacgggagttcctggcctgggcgcgtaaggaggggcttccggaccaggttttgatagattccggccttgccaaccgcggagagcgcggggacctgtacgcccggttccgggacaggctgatgttccccattaacaatgtgtacggggaatgcgtggcgttctccggacgaattctgcggccccaggaaaacgtgggcaagtacgtcaactccccggaaacgtccattttcaagaaaggggatgtggtgtttgccctggacagggcgcgcggtcccatggggaagagcggcaaggccctgctgtgcgaagggcagcttgacgtcatcgcctgccatgaggccggcatttcctttgccgtggctcccctgggaacggcgttcacgccggagcacgccagaacgctttcacgctatgcctcccgcattgtcgtttgttttgacgcggacaaggcgggcatggcggcggcggaccgcgccttccgggagctggccccattcggcaaggatgtttacctggtgaatcttccggagggggacgatccggactccttcatgaagagggaagggaaggaagcgttttcagagatggtggagcaggcccgtcctttctttgaggtccgcattgaacgcgccaaggaacgcggcctgctgactgacgccgccgccagcgccgcctttgcccgtgagatgacggctctgctggcctgcatgagcgaccccgtggcccgcgacctggcaacggcggacgtcgccaccaggatgcgcacgaccgtgaatgacctgcggagtgccgtcaggacggccggacgccgcaagggaagggaacaggcacagtccgcggaccgtgcggcggctgcggaagtttctcagacgcagccccccgtgaagatggaccgtgccgtggccgtgctttgcgagttgtccctccagaacgcccgtgcccaggggctcatcgtggaccgtattgaagaattgctggagccgatgcggatgctgcaaggggggggatcctgaaaaaaatcctggcacggcttccttctccggacagtcccgcggccattcaggcttttctggcgtccctgccacagccggaacgggatgccctgaacctgctgaacctggacccggtgcccatccccgatgtggaccggagcgtccaggaagcctgctccggcattgctaaggcggccctggaaaggcatatcgcgtccctgatggcggaattggcggacccctccacggacgccgccagaaggctggaattatccaaacttagtgttgacttgaagcgtttgctgggtacaatgtagtgcctcgatacctccgggtattgatataatggtgaattgtgccctcttcttttcaagatatgtccaaatccggtgacccatcctcctcttctcccaagaagacttccgccagcaaaaaagcttctgaatccaaggaaaaagtagcatccaagcctgccgcaaaaacttccaaaaccacttccaaggcagcccctgccaaaaaagcccccgccaaggccgccgctccggcggctaaaaagcccgttgccgccaagcccgcagcggaaaagaaagccccggtgaaaaaggcgtctccggcccctgccgccgggaaggccgcagtacccgccaaaaaggctccggcaaaggcgcccgcggccgcaccggccaagaaagccgccgctcccgccgccaagaaggctcctgccaagccggcggaaaagaaacccgccgaaaagaaggcctccaagcctgccgctaaggcggaagctcccaagaagttgagcgaaatcctggaagaggaacgcaagagggccgccagccgcaaggtcacgaatccgattgacgccccggaaatccaggaaaaaatccgtgaactgatcaagctcgccaaggagcagggctacctgacttttgacgacatcaatgactcccttcccaacgacatcgttgaccagcaggactatgaggccatcatggaccgcctgcgcagcatggcgtttgacatcattgacgcgtccgacgtggacagctacacggaccgcacccgcatcaacacggaggaagaagacgaggaggaaaagcttgaagccaagatggacattctggacgaccccgtccgcatgtacctgaagcagatgggccaggtttccctgctcacccgtgaagaggaagtggccatctccaagaggattgaggatgcggaacagaacgtccagcgctgcgtgcaccgcttcggcttcattgcgaacgcctatctggacgtggcctaccgcctgctggacaacgaggaacgctttgaccgcgtcatccttgacaagaagatcgactcccgcgaacgctacatgaaggggctggcccagctctgcgcccaaatccagcagacccatcaggacgcttccagcgccttccgcaagctgtaccgcagcaaggaggccgccaagtccgtgaaggcccgccaggcggagtttgacaagatcaccggcgttctggtgaagctcttcggccgcctgtacttcaagcacaaggtgattgaggatttctgctccatgattgacgaggcccgcgaccgcgtgctccgcatgcagaagaaggtagcccaggacccgtccaacaaggagctcaaggaacaccttgcggaactggaactgcgcatgtggatgactgcggatgaaatgggggaagcctatcaggagctccgcaagtggctccgcgaagcccgccgggccaaggacgagatggtggaagccaacctgcgcctggtcatttccattgccaagaagtacaccaaccgcggcctttccttcctggacctcattcaggagggcaacatgggcctgatgaaggcggtggaaaagttcgaataccgccgcggctacaaattctccacgtatgccacctggtggatccgccaggccatcacccgctccattgcggaccaggcccgcaccatccgcattcccgtgcacatgattgaaaccatcaacaagctgatgcgcgttcagaaacagctggtgcaggaatacggccgtgaacctacgccggaggaaatcgcggaggaaatccacctgcccgtggaacgcgtgcgttccgtgctgaaaatggcccagcagcccatttccctgcaagcccccgtaggggattccgacgacacctcctttggtgacttcattgaagacaaggcggcggaaaatcccatggaggaagcctccttctccttcctgaaagagaaaatcaaggatgtgctggacacccttacggaccgcgagcgcgaggttattgaacagcgcttcggcctccgggacggcagcccccgcaccctggaggaagtggggcgccagttcagcgtcacgcgggaacgcatccgccagattgaggccaaggccctccgcaagctgcgccatcccacgcgcatcagcaagatcaagggattcctggaaatgacggaatcctgaccggatttgcgccgcatgccgtgctacgctccgtggtcatgaagacctgcgtggccgcggcatgcggcattttcattttactggcttcctgctcaggcagcggggaattcaagccctctttcaaccagcccctccagcccgtgatgcagccgggctttgtgtacgtggaccaggtggccccgctggtgaagaccaacctgaagtatgccgggtatgacaatttcgtggggcgtccgctggacggctaccacggcaggcgcgccatcctgcgcacccagacggcgcacgccctgaaaaaagtctcggaagacctgtacaggcagggctacctgctggaaatctatgacgcctaccgcccccacaccgccgtgctggacatttgcaaatggggcgcggacgccggagaccagaagatgaaagcccggtattacccgaacattgacaaggccaaggtgttcggggaccactacgtgcgcgacttctcggaacattcacgcggcgtggctgtggacgtctccctgctgtatgccaaaactggaaagcccgtggacatgggcggccatcatgacctgctggaccccagttccgctacggacaccgcactggtgaccccggcccagcaccggaaccggatgattctgaaaaaggcttttgaaaagcaggggttcgccaactattctccggaatggtggcactaccgcctgctgaatgaacccgcgccctccctgcattattacttcccggtgtgggacggcatggcctcccggtaaatctttgacgcgtccgctgtcacggaccgggcattttatcctttgatttttttccgacggaaataggatggcggaatactgaagaatttgaccagatgaaagaagaacattcccatgattccgccatgcagcccgaagcctaccgctgggctgccgtaatggccctccctctgcgtctggtagtaggctggacgtacttctccgcgttctggcgccgcctggtgctggaaaacaagctgattccggatgatccgggatacatcggcgtcaaattcaaccacttccttcccaatgcgctgggaatcaagccggtcattgaatatctggtgacgcacccgtccgaactctggtggttcatggtggcgtttaccatcattgaattcctggtggggctgatgctcatgctggggctgctgacgcgcctggcgagcgtgggcgttttctgcctggcgctgggcattctgctgggttccggctggctgggaaccacctgcctggacgaatggcagataggcattctgggcatgtgcgccggactgctcctgttcctgaccgggggcggttcctgttcgctggacggcaggctttccaaacttccgtgctgcgcgcgccgttcctccctgtttgcctgggtggggtccggtccgctgccgctgggatacggccgcatggcccgcgtttccatctggggagccgtgttcatgatgctggtcacgctgggaaccaaccagttctttcatggcggcgtatgggggccgctccataacaaatccgtgaagcccctgctggaagtcagcggggcctccctgtccgggcaggaattgcgcttcaacgtattccgcacggaaggcgtggatacctacggctccttcctcgtccgcatcaggctgacggacggccagggcaacaccctgtggaaaatggaggcggaccagctttccgcgcttcccccctccgctatggagaacgcttatctggcaaaggtcaagccgggcgccttcgggctggtcgttccgctgggggccagggccggcgtaacactccccgccgcgctttctgcggttccggaaggtccgctttccgtagtgctgacggatgtaagcggcaaggaatggtccgccccggtccggaaggccggcggcgtatgagcggccccggaagaaggagaaaggcaggataaaaggaaagaattcccggctggggattctttccggaggtggctatgtttgtccgtgctgcgctgtttttcatcttcgagagcttctttgtttcaaagcgatacgttcctttccatcttgacagaataaagggaggggataaaaggggagtaatgaaaactaccctgatcatactctgtctcgtctgcttttcggccgtttccccggcggaagaaaccttgaaataccttctcaaggaaagggaacggcttttatccagcatggctgaactggcgcaggaacagtacaagtccggcatggttccctgggaggaagtgacgcgggccaacttgaacttgctggaattccgccgaaacaacgccggatctctgaaagaagccatcgccgtccagaaggaactggtcaagtatctggagcagctctttcgggatgcggaaaaggcctatgcttccagcgtgggagataaaatgatggttctcaagggccgggacgcatggcttgccgccaagtgcaccctgttgtccatggagagccgtttgggaggggaagggaagtagccggaagctgcggccgcacggtggcggtataaacggcatttgttcatgccgggtttttccatgccgctgaaaggcgcgcatggctgttgtgaatgatggttccccgtattgggaaagcccctgttttctttccggacgcgggaggccagggtattcgtgcagcgtttgccgctggacgcgtcctttccggatgcggcggcaaaccgcaacccatgttgaaacatcatgtctgacgagaaaaataatgattcatccttccattttccggaatcggatgaaaagcagttcctggaaaaaatggaacggctggaaggcaagctggatgatctggagcagcaagtgctccaggctctgtctgaagtggaaatcccgaatacctggctggaggaatgggagaagtttacgaactctgcgcctgaatccggtgaacgggaaatcaggaagtgggtggaaacccaattgggcaagctgaaggggtttgaagccctggaccaactggaacagaaccagatcgcgtctctataccaggacgccctcctgttctcccgggagattttgtccagaaaagagcaattgggcggcacgctgacggatgaagaacgtgatgtgctgaattatattcaaaattcaattcgataaataccatgactccattacttcatctcaggcacttgtttgactttatagcaaccaggtatttttcccgccaggatggaaagcgcaggctggatgcctttctcgttcaggaaggccatgcggcgcttcctcattataattatatcatggaaagactttcggggttgcctctgacccggcattccgctctggtccagatattggccggcattatgacggccaggataagttgtcgccttcattacagggacaatacgcattatcctgccctcattcccacttggatcactttttcccggtatgcctaccttaatccgggagccggagggtatctgatgggaatggcgccgcaccctgacgcagcccttctgccaggcgttccattggcctccctggatcatgccttctctccctttagaggtgcacccggctacgatcccgacagcggacatgtccatgtgcgccatgggtttaatgcctacatcaagcaggaggtcgccgagaacggtgattgcaacgtatatgtggcgtttcgcggaacggatacgggacatgtgcgtgtctttgttcccaatgtattgacggatattttccagttgtattcctgtgacatttgctacattagggcggcgggactgattcgccatttgttgaatcatgtgccgggaatagtgtccttgcaggccaccgggcattccctgggcggcggcatggtccaattcggggtggcggccaatgtagggtcacctctcccggttggcggtgtcgcggtgaatgctgcgggattgtccggtaattccttgcaggcgctgggtgcagaccgtttggcggccgctgccggcgtcttggaccatataaccacttgctgtgatccggtcagtacgtatggcggaggattggtgggcggccggtaccgcatccccaggcagaatgcgcccctttccaacggccatggcattgccgatgtagccgcctgttatatggcggctacagggggtgggggaaacatcccggcagatcctcgctagtgtaccggagggagttgaacgcggaaaggggagccccttgaagcagctcccggcacttccctcttttcttgtgaaaaacgcaagccgtcccattgctggcaatgggacggcttgaacgtgaaagagcaatttgattagtgaggcaggcggaagttgcggttgaaggcggagacttccttcttgagctgggcgaagccgtccgggttcgggcagacctggtcgcctacgtacagcgccagggcgcgggcgatgaattccgctacctgttccacgtctttttccttcatgccgcgggtggtcacggcgggcgtgccgatgcggatgccggagggcttcatgggggaacccgtgtcaaacgggatggcattcttgttcacggtgatgcccacgcggtccagggcttcctgcgcgtccgccccgttgatgcccttgttgcggaggtccaccatgaatacgtggttgtccgtgccgttggagacgacgcggaagccgagttccgccattttggccgccatggccctggcgtttttcacgacctgggccgcatagtccttgaattcgggtttcagagcttccccgaagcaggccgccttagcggcaatcacgtgcatgagggggccgccctgcatgccggggaagacggcggcatcaagcttcttggcgtattcctccttgcagatcacgaagccgccgcgcgggccgcgcagggatttgtgcgtggtggaggagacgaagtccgcatagggaaccgggttcggatgctgtccgccggccaccaggcccgcgatgtgggccatgtccacgaacaggtaggcgccgcaggccttggcgatctggcccatgcgttcaaagtcgatcgtgcgggaataggcgctggctccggccgtgatcatctgcggcttcacttccagggccagtttttccagcgcgtcatagtcgatggcttccgtttcctgggatacgccgtagtgaactacgttgtacagcttgccggagaagttcgcgcggtggccgtgggtgaggtggccgccgtgggaaaggtccatcgtaagaatggtgtcgccgggcttcaatacggagaagtaaacggccatgttggcctgggagccggagtggggctgcacgttggcatggtccccgccgaagattttcagcacgcggtcaatggcaagctgttccaccttgtccactacctcgcagccgccgtaccagcgcttgccgggatagccttccgcgtatttgttggtcagcagggagccctgggcttcccggacggagggggaggcgaagttttcagaagcgatcagctcaatgttgttgctttcgcggcggccttcctcctggatgaacgcggccagttcggggtccgtccattgcagggggctgccggaggatttgacgacgcggcgttcatggcggccgccttcaaagtccgcgtgcagccatgcgtccagcacgtcttccacgctttcattgtccacataggcggaggccaggcacagcaggttggaatcgttatgctggcgggaaagggccgcggcgggggccgtgcggcagagggcggcgcgcacgcccacccagcggttggcggcgatgctcatgccgatgccggaccggcagatgaggatgccgcggtcgttggtaccgtcagcaatgctgcttgcgacttcattggcgtagtcggaataatcgcaggaattcttggtcatggtacccatgtcggtcacttcatggccccatgccttgaggagttctactacggtttccttgaggtcgactccggcgtggtccgcgccgatggcaattttatatgtcgtattcatgatggtgctcattgctgacgggcaaagatactgccttatttcaccccggctggcaagtcccggattcattccggcacgttccggaaggagcggcggccgccttttaccccggaaaaaagggccccggttcctggaggaaaccggggcgagtgggaaggaatggggaagggaccgttattttccggaggattccagcttcaacatgtcctggacgatgttgatgccttcgcggagttccgggtcaaggccggagggatattccggggagtcgtccagttccgccgtggggtcttccgccaggtgcatgaactgttcgttgtccttgtccgggtccgccaggggaagctccctggcgttgacgtcgtccagcgtcaggcggtaaatcttgtacttggtggcgtcttccttggccatttccgcaaagcggcccttgcgttccttgttgatggatttgcggcgctcttccagcgtggagttttcctgttcccgcgtcttcttgttcagggagagcttgttgtccttaatgcgctgcttcatcatggcgatgtcttccctggcaatctggaggtcgcggtctttttccacgcgcttcgcgctggcttccttcaatgcgggcagcatggccgtgatggaggagtcctttttgtaattggtgcagggcgtgatctggtcatagggcatcgcgtagtccagaatgtcttcccccagttcaaacgccgccgtagcggtgggaagctgaatgtcgctctccacgcccttgagctgggtggagccgcctgccacgcggtagaatttctgggtggtgactttcagcaggccggcacggtccctggctgcaaagaagggcaggtactggccgatgtccaccggctgctgcacggaacccttcccgaaggtggagtcatcccccacgatcacggcgcggccgtagtcctggagggccgcggccagaatttcagaggcggaggcgctgagcttgttgatgagcaccacaatggggccgttgaaaagcttctggcggttgtgggcggatttgatgtccacgttgccgcgggtgtccttgatctgcaccacggggccgttcccggtaaagaagcccgtcatcaggcgcacttcctccagggaaccgccgccgttgctgcgcaggtcaatgaccaggccgtccacgttttccttgttcatccgttccaggatttttttgacgtccttggcgcagcggcggtcgccgccttccatgtccgcatagaaggagggaaggctcagcacgccgatgcggttctgcccttccggcgcgccggtgagttcgatgatttcgcccttggcgagttcgtccttcaacggcaccttggagcgggtcagcgtgatgatcttggcctggccgggagcgtccgccggttccaccttcaggcgcatctgggtgttttcagccccgcggatcatgtccaccaccttgtccagcttcaggaacaggatgtccaccatttctccggagttgttggagtcaatggccacgatgcggtcgttcagcttgagctctccggatttgtcagccggaccgcccacgacgatacccgtgattttggtggagccgtcgtcttcactgcccagcagggcgccgatgccggtgagctccgtgcccatggaaatcttgaagcggtccacctggcgggcgcccatgtagtccgtgtgcgggtcataggtcatggctactgcgctgagcagggtttccgccacgtcttccaggtccgtttcctgaatgttgcgctggatgcgttcataacgcatgagcagtttttcctccgcaggcttttcattggccagcgggtcgggcttgttctgttccttcgccaggcgcgccacggtttcacggcgcaggatttcagacaggagctgttcctccaccatgtctttccagacctgctgcatttccgcctcatccttgggccacgcggcggtcttgcggcgggagcgttcaatggaccggtccttgtcaaaggtaaagccgccctttttcagcaggtcccgcgcataggcgatgcgctgcatggcgcgctgccggtacagggcgtgcatggcctgggccgcgtccatcatctggccggacatcaggtagtcgtccagttccctgccgtatttcttcttgagggcgtccacatcctgctgggtgaaaaatatcttgttgggatccaccttgcgcaggtaggtttccaagaattttccggacagttcgtcgctgaattccttgcgggagaagtggaagttctggagcaggagggacatttgcttgcccacctggttgaagtccgtggccgcggaggcgcaggaggtgatggcggctgcggccagggccgagaatgctgtaagtcgaatccaacggaatgagtgcatgttcataacggaaaagggtgcggttttctccatcagggaaaaaaagctagtgctgggatgtgagtgttactgatttgtaggtgattgtctatcttataaaacgtccacatgacgctattttacgcgccgggtttccggaagggggaaagggactgccggagggcggaagaacccccgtccgtccggaaggaacggcatccggcggggttgcaatcctctgcgaatgcagggcgcgggagagaggaagaaagaggcaaattcattagtggacaaatacaccataaagtttgaaattctgtgcggaagtccggcatttgtcatattggggccgtacaggaaggagaacgcggtttccggagactttttcccgtgcgccgtagcgccgcccgcttgacggcagcctttttctttttccgccgccgcatttctcccggagcggggaaggcattccttccttgtcagcggcgggggagggccggacggggcgcggatgtttccagtatggccgccgcggggaggggaacatttcaggattgaggtcacggaggttttctgtacacttcgcgtgatgatgagaacaccgaaccaggacaagaagccttccggaagcaaaatgggcgttctgctgcagcgttcattcagcaccgtggttctgctgggtttgctggcgggggccctgtggtgggaccgtgaacttgggtattacgggctggtctgcatcttctgcatcctggcctcctgggaatggaggcacatgctgctgcgttccagaaaagcctcccagccgaacctgagctttcttttcggcgcggcgtatcccgtgctgctgtcctgggcgtgctacgtgaccaagttctgggaaatcgcccctacggagaatgccccgttcctgattccccttcctcttctggtggcgcttgccgccccggtccttctggtcgtgatttcctttatccgtgaaatgaagtatccggtggtgggaagccgggcgctccgttccgtcgggaccacgctgctttccttcatttatcccggctggctgttcgcctttgccattctggccctgcatctggcctatatgagggtagggtatgtttatccgtccatcgtcatgtgcgtgctatgggtcattctggtgacgaagatggcggacatttttgcctatgtcagcgggttcctgctgggaggccgcattttttcacgcaggctcattccccacatcagccccaagaagacgtgggagggcatcctcggttcctgggtgctgacgaatgcggcggccatcgggctggttttcccgatgttcagggtctccgtcctgtccatgccccagatgctggtgctggtgggctgcgtctccttcattttcctgctgtccgtttacggggacctggcgggctccctggtgaagcgcagcctggccatcaaggattccggctccctgctgccggggataggcggcatttttgatttgattgacagtccttcctttaccgtgccgttcttctggttcctgctggcctgcatcggttgaacggcccgggcatgaacggattcccctgtaacccggtatggattccccctcccttcccattgaggaaatccgcggagaattgctggacgcgctgcaagccccctctccgcgcatcctgctgaaagcgcccacgggctccggcaagtctaccggcgttccccccatgatggatgacgccgggctgggggaacgcggcctgatcgtcgtcgttcagccccgccggatggccgcgcgcctgctggcgcgccacgtggcccggctgcgcggagtggagctggggaaggaagtggggtatgtggtgcgctttgaacggcacatttccccccgcacccgcattgcgtacgtgacggacggcatgctggaacgctggctgacggagcggcccgccctggaaggggtgagcgccgtggtgtttgatgagtttcacgaacggagcctctccggggatttgtccctggggcgcgtattggacttgcaggaaggcccgcgcccggacatggccgtagcggtgatgtccgccacgctggaaatatccggcctgcgggattacatgggcgcctcctgccgggtgctggaggcgcacggaaggcagtatcccgtagaaaccgtttaccgggctccccggctggtcagcgacggccgcggcagggtggctccccctcccgtgtgggagcaggcggcggacgccgtgaaggaggcggtgaaggatgacggctgcggggacgtgctgatattcatgccgggcgtgtatgaaatccggaaaacggcggagttgctggccggcaggccgtggatgggcggccgggacgtttttcctctttacggagcgttgaccccggaacagcagaatcgcgccgtggagcaggggaagaatccccgcgtcatcgtttccaccaatgtagcggaaacctccctgacgattgagggggtgcgcacggtgattgattccggtctggtgcgccggtccggctgggacccctacaggggcatggatacgctgcacctgacgaagatttccaaggcgtccgccgcccagcgcgcgggccgtgccgggcgcgtggctccgggccgctgcttccggttgtggagtgaggcggagcaggcgcggaaggcggattttgatccgcccgaatgtttccgggtggatctggcgggggccgtgctgaatctggccgcgtggggcataaccgcgccggaagggttccgctggctggatgcgccggaccccctggtgatgcagcgggccgtgaacctgctggccgccctgggagctacggaggcggacgggagcctgacggacgtgggaagaaggatgaccgcttttcctctgccgccgcggctggcgcgcctgatggcggccgggcaggatgaacagtgcgtggtggagcttgccgccattgcggccctgatgcagggggagggcgtggcgatgaagggcggcttgaacgacaacctgcgcgattctgcggactatacggattttcaggcggagtggcgcgcggtggaaaaggctgtggacgccgggtttgaggcgggggcgtgcacccgctggggcatttccgcccgtggggcgcgggaagtgtggatggcgtatcggcagcttttgtccatcggcagccgggggaaatcccgggaaatgccggagcctgatttcacggcggcgcggcctgccgtggtccgcgccatgatggagagctttgcggaccatgtgggcgtccggaacggagtggccgccaacacgtgccgcatggccggcggcgtggggggcaggctggcggaaggcagcgtggcgttccacggggagcattttgtggcggcggaggtggcggagttgtccggaaaggcggtggaaacccgtgtgggccgctgtacgctcattgacccggaggagctgcgcgccgtctggccggagcgtttttccggcggggaggcggccgtctttgacgccgtgctgcgccgcgtgcgcctgcaccggagactgatgtatgaagacctggtgctggaagaccgggaccgcggggacgctccgccggagctggccgcccccattctggcggaaaaggtggtggacggaaccttgaagctggtgaaatgggatgacgccgtggagcagtggatacgccgcctgaacggtttaagcgtctggatgccggaactggaactcccccgtttttcagaggaagacaagctggttgccatctccctggtttgcgagggagccgtgggctacaaggacatcaaggagagggagatcattcccgtgctccgggactggctctccggctggcaggcgaaggcgctggacgattacgctccggtgagcctcacgctgaccaacggccagcacgcgaaagtgaggtacggggaggattccacgcctgtgatcggccttacggtgcagcggctgttcggcgtggcggcgtctccgcgcattgccaacggctccgtgaccgtgaaggtggaggtattggcccccagccagaggccttggcaggtgacgggctccctggaaagcttctggcggaacggctacggccagatgaaaaaagacctggcggggcgctatccccggcaccgctggcccgatcctgaagagctggatttcctcccccgttcccgttgagaaggcgaaaggatttttctgtaacaaaacagtagcaaaatcgtccgtttccgtgtaaagaggcggtggtgcagctcgcggacgccctccgcccaccattcacaagagacagttatggactcaatttactggattatcatcgtagccctgctgcttctggcggcatttgacctgatcaacggcgtagcgaatgacgccgtcaacttcctcaactccgccattggttccaaggccgcccccgtgcgggtgatcctgaccgtggcttccatcggcgtgctggtgggcgcctgcttctccggcggcatgatggaggtggcccgcaacggcatttttcacccgaacatgttcagttaccacgaagtgatgctgctcttcctgggggtgatgatcagcgaggtgatactcctggataccttcaataccttcggccttcccacgtccaccaccgtttccctggtgttcggcattctgggctccgccgtggcgacggccctgttcaagatttccaagcttcacatgacgcagtccgtgtgggacttcatcaatacggacaaggcgtttgaaatcgtcaccggcattctcctttccgtagccatcgccttcacggtgggcaccatcgtcatgtgggtttcccgcctcgcgtttacgttcaaataccagtcccgcttcaagtggttcggctgcttctggtgcggcatcgccatgacggcggtggcctactttgccgtgttcaagggcttgaaggaatccaccctgatggagccttccttcattcaatacattgaccagaacctgggcatggccctgctggtggccttcggcggtttttccgtgctcatgttcctgctccagcacctgttcatgacgaacatcctgcgcctgaccgtgctggccggcaccttctccctggccctggcctttgcgggcaacgacctcgtgaacttcatcggcgtgttcatgggcggcctggattccttccagtacgccacaggcgtagtggaggccggcggctccgcctcctccatcaccgccatggaatgcctgatgcccgggcagggcgttccggtgaaccattacattctttttgccgccggatgcatgatgatttttgcgctgtggttctccaagaaggcgaagacggtgatcgccaccggcgtggagctttcccggcagggtgaaggaggcattgaacgcttcggctccgttccccccgcccgcgccatcgtgcgcagcgccatcgcgctggggcgcggggtgaaaaagcttatccccgcccgcatgctggtgcgcatgaaccatcagtgggatgctgccccgcagccactgaaccccaaggaccgcgtggcttttgacctgatccgcgccacggtgaacctgacggtggcttccctgctgatcgcgtgggccacgggcaagcagctccccctttccaccacatacgtgacgttcatggtagccatgggttcctccctggcggacaaggcgtggggcagggaaagcgcggtttaccgcgtgaccggcgtactgaccgtaatctccggctggttcatgaccggcctggccgccttcacgctggccgccgtcatggcgaccgtcttgcactacgggcaggtgtacgccatcttcgggctgctggccctggtggtcgtcatcctggtgaaatccaccatcatgcaccgcaagcgggagaacaagctttccgtagagcgttttgaccagattacggaggaaaacattctggacgtgtgcagccaccaggtcgtggacagcacgctcaagctgcgggaaatctacaatgacaccgtggaaaacttcttccagggggaccggaaggccctgaaagagctggcggacgccgcggaacgcctggccctgaccagcagcgagcaccacaagtacgacattctccccatcctgtacaagatgcagtcccgttccctggacatgggctaccacttcgtgcaggccctggagcatttgaacgaagccacgcagagcctggcgcagttttccgagtccatcttcacgtatgtggacaataaccacacgccgttcacgattgaccaggtggacgacttgaaggaggtgcataccgctctaatgaagcttctggatgaatactgcaagatgctccagacgggaacgtacatccagttcgactataccatggtggcccaggaacagctccttcaactggtggcaaaggccaccaagcgccagatcaagcgcgcccagcgcaaccagacgcgcacccgttcctccctcctttatctgaacatgcttaatgaaatgaggttcatggccgtgcaggtgcgggccctgaccaatgacgaacggaacttcgtggcggcgtaaggcggcggggaaccgggctttttgcatgaaaaggaaagaaaaatcttgagcgtttggttcatgcaagtatgctgaatggacaggggtgttcgataaagaaggaacgagagccttccgaatcaccaggaacgaccctgatttcataggtagttagttggagcggctgcggaaggaattccgcagccgcttttttgcccccgcaggaggggggcggaccttgtgtcatacaaaagaaggaatgtttgaacatatttcccgcccggctgtctcacccataacggttatgatccggatgcagtgaaagagagagcacttcatccacttaaggactcaaccgtcttcataggtagttagttgaacagcagccccggcgaagggattcgccggggtttgttcgtctccggatggcgcattccacgccgtaaacggctggaaagaagcggggaaggaagaataggaggcgttttgccgcggggtttgattgacgagcgggacgcatcagggcatagtggcagggtatgaagagagcgttttgcgtgatagccggtgcatgcagcctgcttggatgggctccggcggacgaggctggcatgaagaatgcgctggcggactggcaaatgaggcagtccgactgggaatccgcattcaaaacggctgaaagcgatgaaaaaagagcggaactgatggagagccgtccgaacgccattccggtggcgcaggaattgtggaggcaggtggggagggaccttcaaaagcccgagactcaaaaaccctaccttctcccggctgtcatttggtttctggaccatccccaggccgtggcgcaggctttccccaacggagacgttgccaggaaaattgtcgtgctttgcctggactccctggaaaataccctgttccgggaaaagggagcgggaaaagcggcgtatgcgttgagcaactcccgcgacctgcgctgccgcgttattctggaacaaatcaaggattacaaccagtttccggaagaccaggggctgtccgccctggggctggccatggtgatgaaggaaacgacgggaatgctccaggatgacgtcaggctggtggcggcacgcggaaagctgctgaaagacgccatcatcaaatgctatgattccagcttcggtcccgttccggtccggaatctggtgaaggaagagctgtatgaaatacgcaatctcaacattggacagaccgggcccaaaataagcctgccttccaccgccacgggcgcggaagtgacggtcccctccggagacaagcccgtgctgctggttttctgggatccccgggatgtgcgctctgtccagtttttgcaaaaggccgtttccctacggaaggaatttccgggcctgacggtcatgccggtggcccccggaaacagtgaggacgtgaaaaaggccctgctgaatttggagatggatactccctccctggtagatgaaaaggcggcggcgttcaaggattaccgcgtgatgctcacgccgcgggtgtacctgctggaccctgcggggaaaatcctgatgcgcggcacgccggacatgctgtttgacgcgaatctgtacgcggtcatgggcaagctggaagggaaaaagaatggaaaggcggacgagaaaaaggccccggccgcccccgctgccgtgaagccggctccgctgccggccaggatcaactctccggatacgcgcattccctccgttccgcagcctgccgcgccccggccagcggccccgcctgcttcctccggtgtggagcagccctcttctctttccgctccccccttgcggcccatgcccgaatagcctgttccatggaaaatattccattgagaaaggccgcggaggctgtggcgcgcttgctggccggagcggggcacacggtgtattttgtgggaggctgcgtccgggacaggctgctgggatatcccgtgaaggacattgacattgccacctccgcccgtccggacgaggtgttgcgcctgttcccggacgcctgggaagtgggcgccgccttcggcgtggtgctggtgcgccgtggcggtttctcctttgaagtggctacgttccgcagggacggctgctacagggacggcaggcgcccggaatccgtctgcttcacggatgcggaggaggacgcccggcgccgtgattttaccatgaacggcctcttggaagatccgttttccgttcctccgggttatgtggtggattatgtgggcggcgtggaagacatccgggcccgcgtgctgaggtgcatcggggagccggaccgccgttttgaggaggactccctccggctgatgcgcgccgtccgtttcgccgttaccagggaagtgcgggtggaagcggaaacttatgccgccatttgcaggaacgccccgctgctggcccgcatcgcgccggagcgcatccgggaggaactggaccggattctattgtctccaggaaggaaacggggcgtggaaatgctggtggaaacggggctgatgaagcatgttattccagaggtatacggcatgatcggctgcacgcagcctccccagtggcacccggagggggacgtgtatgcccatacgctgatgatgctggacgcgctggggaaggacggcgcccccgtgtctctggagctggccctgggcgtgctgctgcatgatgtcggaaaacctccctgccgccaggtggatgaaacggggcgcatccgtttttccggtcatgacaaggagggcgcctccatggcgcgggacattttaaggagactgaaatattccaatgccgtgattgatgcggtgtgcgccatggtggagcgccacatgcgcttcatgaacgtgcagcagatgaagaagtccaccctgcggatgttcatgagcgctccgcatttcagcgacgagctggagcttcaccgcctggactgcctttcctccaacggattgatggacaactggcagtttgtcagggacgccatggattcctaccgggacgcacccctggtgcctccgcccctggtgaccgggcgcgatctgctggacctgggactgccccccggtcccgatttcaggaaatggctgtcccgtttgcaggagctccagttggaaggaacgctccggaccaggaaggaggccctgctgatgctggggcaaattgccccggtggaacagaatacacttgcagagtacctggaaaagttagcattataggccgcaagacctcatcctttcagctcatgcgcccggtcatttatcaactgtttgtccgccatttctccaacatggaaacccatggggtggactgggggacccgggagacgaacgggtgcggcacctttaacggcgtgacggacaaggccctgagggaaatagcccggatgggctttacccacatctggctgaccggggtgctgaggcacgccacgcagacggcctatcccgagctgcccgcccagccggaatccatcgtaaaaggcctggccggcagtccctatgcggtagtggattattttgacgtggacccggacctggcctccacgccggaaaaaagaatggaggaattcaaggccctggtgaagcgctgccggacggtgggactgctgccgatgatcgacttcatccccaaccatgtttcccgcgcctacctggcggactgggacggccatgacgatttcggggaaggggacgaccaccatacgtttttctctccggagcaggggtacttttacctgacctccaacagcccgggggacggcccccccctgcatctgccggacggcctgtttgaaggggaaatgaccttcggccgcgtcacgggcaacaatgccgttacgtggaaccccaccaggtatgactggtatgaaacggtcaagctcaactacggctataacttcctggccggactgccgaccctccgcctgctgccggactggaccagccccaagcagcacgtgcccaagacctggcgcatcatggacgacatcctttccttctggcagggcctgggcatcggcggtttcaggtgcgacatggcccaaatgatccccatggccttctggaaatgggccatttcccgttcccgcgtccgtctgcctgacgtgtttttcatggcggaggcgtacaacgaccacatgaagaccactcccggcgatccctgcgccgcgctgctggaagccgggttcaatgccgtttacgattccgattgctaccatctggcgctccacatgtacacggagaataactgggccaacgatttcgaccgtcttttccgcagcaaccccaagtacatgaccaacggcgtccgctatgtggagaaccatgatgaaacgcgcgtgtgctccccgctctcctggggcggcgtggggcgtaccgtcctgccggccatcatgacgctggtgtacgcgtccggtcgcggtcccgtgctggtgtacaacgggcaggaagtaggggagcgggcggaaagccccggcggctatggcggccatgacggccgcaccagcatttttgactacacctgcctgccccagctccagccctgggtggcggacggacggtttgacgcctctctgctgccggaggactccgcggagctgaggaactttcatcagcggctgcttcccctgatgcagcatccggcactggaccgcggggctttttacggcctgaactgggccaacatgaaaaacaccacctttggcagggaacctgcggaagacacctccggccactgggtgtacgccatgctccggcatgatgcccgtgccagggccaccgtgctggtggtggggaacctttccccggagatcaacttctacaacctccgcatttccattgcccagcacgccttcggctggtgcggcatccagacggaccgcgtgcgtgtcaggaacctgatggccggagagggggaagaccgggtttttgaccggaaggaactgatggaacgcgggcttccccatcccctgaaaccggggcatgtgggcgtgctggaactctctgccgtttaaaggcgcattccctccggaggggtgcggctgctctttccgatattttttgctctgctgggcgtttttataatgacgggcggtttttaattcggtatagtcccggaaattcctatgactagacgtttccctcactccatgtctgccattcagcaaattgccctggcgcttgccgttgccggtattggagccggccaggggctggcccaggaaggagcaggggccgcccgccggactgcggcccggatggaagagcaggcccaggcttccatgctgctgctggggcaggcgcgtcagctgtattccgagggcaagtaccaggaagccctggacaattaccgcaggagcctgaccgcgctgcccaagtcccccaacatggagaagcggcgccgttttctggaaaccagcattgcggacgccagcgtggccgtggcgcaggaatacatcaaggtggggcgttacgacgaggccgtcaagctgctggaagatgccttgaaagccacgccggaccatgccctggccaagcgcacgctggaaatagcccgggacccggttcgcacgaatccggccctatccccggaacacgtcaagaacgtggaggaagtcaaccgcctgcttcgcctggcttacggctattatgaactgggccagtatgatgcggccctgaaggaatttacctccgtcctccagacggacccttacaacacggcggcgcggcgcggcatggagctggtcaaccgcgccagaaccgcctactttgacgctgccagggatgaaacccggagcagcgccctggcggacgtctccaagctgtgggagatgcccgttccgctgacggaaacgccggaggaacccgcttccttctcccagccgctggacaatccggtggtgaatgtggaccagaagctgggcatgatccgtctgccccgcgtgcagctggacggcgcaacggtgcaggaagccgtggactatctgcgcagcctggccaggacgcatgatacaacggccatgacgacggcagagcgcggcgtgaacatttccgtggaccccggtcctgcggacagcgtttcagccaaggagaccgccggcaagagaattacgcttaatcttcaaaacgtgccgctccgcgacgccctggaatacgtggcgcgcgcttccggcctcattctgcgcacgaacgcctttggcgcggagctggtatccagttctgacggcacctcctacatggtgaccaaggccattgcccttcctccgggtttcttctccggcctgtcggaatcctccgattcggaaaatgccgatcccttcggttccggggatgccggttcttccggcatgaccctgaaacgggtggacccgcagaaggcgctggcctccctgggcgtgaaattcccggaaggcagcttcatcaaatacaactcgggcaactccaccctccttttccacggcacgcccaaggacttgagcatgctggaggagctggtggcgtccaagacggcggaacagcccctgcaggtggttgtcagcgcgacgttcctggaagtcaatcagacggacctggaagaattgggcttcaactggatcgtgaacctgaacctggacccctccaagtggttcatgggcggtgcgggcaccaacaagaatgactacaacaacactgtgctggacagcgccgccagcgtggtcggagccgccgtcccggcaggggtggtgggtggactgaggtccggcaaccaggtttttacggaagacagcattgacggcatgattgagcgcggttcctccgccagaagcaccggcgtggcctacgttcccggcggtgcacccagcatcgtcaccatgcgcggcatgtggagccaggcggacatcacgatgatcatgcgcggcctgagccagaagaaaggcacggacatcatgcagcatccttccgtgattgtgcgcccaggggaaaaagccaccttcttcagcggcaaggaactgatttaccccacggaatacgatccgcccgaagttcccaacagcacgggcaacaacaataacggagacgactggggcgactatgacgacgatggcggagaccgcctgccggtcatgcccatcacgcccgcccacccatccgcctatgaaaccaggcagctcggcacggtattcaacgtggaggtaaccggcatcagcgatgacaaatccatcgtggaaatgaccgtagtgccggaaatcgtggactttgacggcttcatcaactacggtacgccgctcttcgtccccgtggcctcccaggagaaaaatgcgaaggaagacatcgtcatggtgaaagcttccgacaacttcattctccagcccgtattctccacgcgccgcctgaccgctccggtacgcattgccaccggcagcacgctcgtcatcggcgccttgaaaaaatccacctccatcacgtatgaggataaaatccccattctgggggatattccctgggtgggccgccttttccgctccaagggatccaaggaagagcgcaaggccatcatcatcatggtgaaggcggaagtggtggacccgggcggcaagcagctttacacgccgggcaccgccgttccggatgaggaagctccggcagggctcgcgcctcttcccgccctcagcaatgcccagtaacctttaaccggattaagactattgaagaacagtgattccgatcctgagtcctcttcttcctcccagggggcggacaatatcatgcgccagctgcatgcctcggattcccagggcgtggagcgaaagagggaagtagtggtgcgcccggacggcagcaaggtcatccgtgtggaaaaacgccggcggacctacaatgacgaccacggggacgccaagcaggccgtgctgaaaaacaagcgtttcctcattggcctctgcatcttggtcctgctggttgtgggcgccctggcgggaacgtacatgtaccgcctgacttccttcaatacggaggaattcgccgggcggctgcaatcggacctctccgccgcctggggcgggaaggtggaagcctccggcatggcgatggacggcctttccatgaaggccgcccgcatcaaggtcactttcccgcaggattcctgcctgtcttttgtaatgatggaaggcgtttccggagaaatctccgccacgtccctgttcatgggaaaaatcaagggggaaagcctgaacatggccaaggtcacgattggcctgcgtcccggattctccaaatttgccgtgccgcagacgaagcgggaactcccgttcgtcttccggcggtacacctctccgcgcctggaggtaggttacgcccacaagacggaggaacttaccctggagcggaatgacggccccttctacatgacggcggaagcctacatccgcacgtccggaaacggtacggaaccggaatacgtgctggacctgtcacagcaaaagctgaaaatcaagggctggcctctgatgggcgtcgactccggctccatcattttaaacggaaacggcgtcaagcagctcaccttctccggttttctggacaaggggcgcctgctcaacaagcctacggacctcagccccttcatgattacggggaatttcctcttgggtacggatttccgccaccaggcctggaccctgacgggcaggaattttgacctcctctccctggtgggggatgacttcgcttccttcctcaaggtacagatgggggaacaggaagtggatgaaaagcatgaattgaagctggactttgcgctgcccgtgacggacgaacagaaaaggccctccgtaaaagggtacagcggttccgtcatcaaggcgaccatgctcaggctgcccgtcctgcgcctgctggcggccatgaccgcccggaacacggaaataaggctgccttactcttccccagtctttacgtccggctcctttctgctggaaagcgacggaacggaccgttccgcctccctgaaagagatttccctgtttgagcagggcttcctgggagtgaccggggttctgtacagcaacggttccgccgtgacgggagagctggtctttaaaatcccctcctacatggtggatagccgacgcctgccgtccggcgttacgcaggaggggcatgaaatcattctccccgtgaaaatttccggtacgccggcatccccgcaggacaactccgccggcatgctccaggaagtggagccgcgcgcggaccgtccgggaatggggactgccccctcccgcggaacggctcttcccgctccgtcaagtaccccgcccgcccgcattacggtggacggattcatgtgatattgccgaggattcatgttgctgctcaaccccattgtccgaaaaacgtccgaaaagcgttcccgctggtggaccaagctggccggcttcggcctgtggtcgttgctccagcccatctgcatgagcctgaatatccgctccatcaaggaggagcacgacgacgtttacacggcgcccttcctggtggccctctggcacaaccgcacgacggtgcccggctacgcctggtccctggcccagaagccgctcaagatgtgcgtgctcaccagcgccagcaaggacggcgccctggtggaggccgtatgcaaacacttcggcttggattccgtccgcggttcctccggacggcggggagccctggcctacatggaaatgatgaggaaggtgcaggagggggacgtctgcttctgcctcaccccggacggtccgcagggccccatttaccaggtgcaccacggcatcatcaagatggcctcccagtccgggcttcccatcgttcccgtgtgcatcgaatatgaaagctgctggaggctgaacaaggcctgggaccgctacgccattcccaagccgtgttccaacgtgaacattctatggaaaaagcgcctgttcattcctccggacgcaacggatgagcaggtagcggactacgcccgccttctggccgggctgctgagcgaggggcttccggacttcccgccacttaatcaatcattattatgcaaatcatcgacggaaaacaggtagcctcccaggtgctggaagaggttggaaaggacattgcccggctcagggaacagggaataacgcccggcctggccgtggttctggtgggggaggaccccgcctcccaggtgtatgtgaattccaaggtgaaaaaatgcgcggagctgggaatgaactcccgtaaaatcgttctctccgcggatgcctcccaggaagaactgctccaggtcgtccgtgacttgaatgcggacccctccatccacggcattctggtgcagagcccgcctcccccccatatcgacgaggcggccgtggtcctggaaatagaccccgccaaggatgtggacggcttccacccggagaacgtcgccaagctggtgctggaggatgaaaccggttttgtgccctgtaccccgctgggctgcatgaggctgttgcaggcggccggcattgaaacggcgggcgcgaatgccgtggtcatcggccgcagcatgatcgtgggcaagccgatggcccatcttctgatgtccaagcaggcgaacgccaccgttacggtggcccactcccgcacgaagaacctgccggagctttgccgttccgcagacatcatcgtggcggcgataggcaggcccgcatttgtgacggctgattttgtgaaggacggcgccgtggtggtggacgtgggcatcaaccgcgtggaagatgcctccgccaagcgcggctaccggattgttggagacgtggcctatgatgaagtggtgcccaagtgccgggccattacccccgtgcccggcggcgtggggccgatgaccatcgccatgctgatggctaacacggtcaaggcctgccgccagcagacgggggcctgacggagtgccgtgacgtccgtttttcttgtcaaatgaaggaaagtagggcagtattcacttaccattatgtcaagtaaattactcgaaggcaaagttggtgtcgtaatcggcgtggcgaacaagcgcagcatcgcgttcgcaattgccaaggcatggcatgaagcgggcgcaaagctcatcttcaattatcagggcgaacgcctcaaggacggcgtgctcaagctggtccatgaaaacttcggcgaagacgtccccgtttacgatctggatgtcagcaatgatgaatccatcaatgcattctttgaaaaagtccgggaacacacggacaaggtggattgcatgctgcattccgtggcttttgccccgaaggaagcccttggcggcagtttcctggatacgggacgcgaggcgttcaagatttccctggatatctccgcctactccctggtggccctttcccgcgccgtggagcccatgatgtccgacaacggcagcattctggcgatgtcctacctgggttccgaaaaggtggtgccgaactacaacctgatgggcgtttccaaggccgccctggaagcctgcacccgttatctggcgtatgatctgggccgcgcccgcggcatccgcgtcaactgcatcagcgcgggccccatgcagacgcttgcggcacgcggcgtttccggctttaacaccatgttcaaggtgtatgaggaacatgcccccctgggccgttcctgcacgggcgaggaactgggcgctaccggcgtcttcctggccagcgacggcgcagccgcgatcaccggacaggtgatttacgtggacggcggctatcagatcatgggcatgtagcattccctccgggaaaatttcccctttgtttcaggccgtaccgcttgtcggtacggtctttttgcgctgtttccgcgggtatgacagggatgcgccatctctcctgtcaaaaattcttgtgttccggtgtctcatttttataaataagaaaatgacagcctcccctcgttatctgtttaacggagaaacgtgcggcagcttggatgaattgttcctccgctacgggaactcttctcataaagcccatatctcccttgttggcggggacggaatgcacatgcagtccgttccggtgggtaacggcctttattattgcgaggtgggggatgacgcccatggctacgtctgcccccatgaaatgccggttgaggaattggaggaacaattccgccgttttgattcaggggaggatttctcctttgtgaaggaagattggagcttttacgaaccttccgcctccccgcttccggcgatggtcaaatggattggcgtcgcggccctgatggatgccgccattgtactggccttcatcgggcttccggagggccacaccgtccatctttcctgcatgctggatacgtttacccgttttctgctcagttaaggcgcgcaggggcggcctgttgaaggaagccttttgcggctcctcttcagggggcgagtaccttcagcgtgccgtggcgcgtgatgcggaccggggcgttgcccatataatcgccgtccagttcacaggcggcctgtccggcggaaatgacggttccccccgtcatccggatatattcaaaggagccgttccgccgggaatggaagcctccgtggacggcggccatcaggcattccccgatgatggagggaatggaatgtttgaaaaccacggcgtccagaagaccgtcgtcattatccgcttccgcaaagaaattcagcggtccgccgtacctgcgcccgttgccgaagaggatggaacggcctgccaccacccgcccgtcatccgtggacagggtcagccggggctgccgctccgtgcaaacccgggcgccggcaatgacgtaggcgaaggccttccatttctttttcatttcccacgtggtcagttccacggcacgggcgtccgcgcctatgcccgccatctggagaaagggctgcccgttgaaggcgaacaggtccacgtccctgggacgtcccgcattcagaacatgcagagcatggtcaaaatcctgccggataccgatttcacgggagaagacgttcatggttcccgcggggaagggggccagcgccgtttccgtattgcagagggccctggccgccacgcccagcgtgccgtccccgcccgccacggccacgacgggagttccggaatccgcccgggcggccaggtggcgcagcatgtcttccctgctttccggctcaatgacgtcaaaaagatcccggtggccgtccagccagcggcggaagcggtcggccctggcgctgcgcgccgtattattgaaaaacaggggaatcctcatggagcggtcacggagaaattcaaaatctgcaccggggcttccgtatgggccacgggttcatggcgcactgttccgtcgggcagcatgaatcccagaatgccgcgggagacgttgtccggcaggcgcacttccagaaacttcctcatgtcgtcggatgggccgggggtggtgccttccgccaggactttcccttcttccgacttgagaacgacgcgcaggggcagtcttctgccgctgccttccttcccatccctgatatccagcatcagcctgctgcccggcaggtactccggctgtgccgccacccagtccgacgccagtttcatataacggtccgtgatcctgacggcggggacggtccggctttccggagggaaggtcagcgcgcgccttttttcgtcgtagcgggcttcccagatcagcgggaagaactctccggcgccctccttcttccaggaggtggcgtaaatggcgttctccggtttgcgggggtccagcatgctgatggcggacatcacccacggggtgttgaaatccttctcgttgtactccagcattttccattccccgtcacaccaggcttccacccagttgtggttgccgcgcacatggttccaggtaaggacgccggccatgcgggccggaatgcccacggagcggagcgcgcagacgagcaggatgctctggcccgtgcaggaaaccttgccggattgcagggattccttcaccccctggtgaggaacccttctttccgtggaatagcgcacattcagggttttctggatgcaggaggcaatcgtgagggcggcttcccggcccgtcttgcatgcggaaaccagcggcgcaaagaggttgtggaactgttcccgccattcgtcgcgcggctcgttgaccacggcataggggagcacgttgttttcataaagctcccacggaaccttgccggcccaggggaactggctgcgggcgtccagcgccaggcggacttcccggtccagccgttcttccgtaatcgtttccctgtcctgcgcgggcatgtaggcgcgcaggaatcccactccgtccggaatggcgtcatgggcggcgcagagagcggcggtcaggcccaggagaagggcggaaggcagcggattcatgaacaccggaattcatacctgaatcccgggagggagacaagcttcctcttgcgcaagtagggcatggaaatgggcgaacaggtgcgtgtcttccggcggcgtgggggcaaacggggcgtcattgtccaggatatcctcgcaaatgcgcatgaaatcgcgggaggttttcgcccttttcatgtaatggtcaaaggaatagggaagcccgcgcgcggtgtaaaccaggtattttttcatgcggtggatgtgtttttcctccacataacgctcctgcatttccagcgtgcgctcatggaggcggcggatgtaatgcagcacgtcccggaaggtgggggaagcagggactctaccctggaaacggtcgtgaagctgggaaaatatccatggattgcgcagggccgcgcgcccgatcatcaggcctgcgggccgggccagccgcacccacgcgtccgccgtggccgcatccacaatgttgccgttggcgaccaccggacagtccagcgcttccacggcccattttacccattccggatgcaccggggagcggtagccttcccgtacggtgcgggcgtggatgcacaccctgtccggggtgtgggcggcaatcacggggagaatgcgttcaaactcgtccggattctcgtatcccaggcggcatttgacggtgaaggccccggcgggaagaacgtcccggagcgcgcccagggccgcgtccatggccttcagggagcgcagcatgccccctccggcgtttctcctgcacaccatcggggcggggcagcccatgttcaggtccacccccgcgcagtcgtgctccatcagggccagcgcgtccctcgccaggtactccggctcatggcccacgagctggccgtaaatggggcgccccgtgggattttcatcaatggagcgcaggatgtatggcgacatctttttatgatgggccaccgttctgaaatactccgtgatgaaataatccggcagtgaattcaagtccttcaacgtcttgaggaaagccagatccgtcacatctttcatgggggccagggccaggagcatgcgcctgtgcataccgtgaaaagccccggttggcaagctgtgattgtcttgacgaaagaaggaaagtgtggaagctgtgagcatgaatcaggactcaacccgcaaagccagagtgaatgtgagacgagccgaggtgatggaacaggtggagaaggaaatccagcagcattaccagagtgaattgatttcccatatccggtctgcgggcaacgtgtacaacctgggccacacggaatttttcctggcgagggagtttggattctgcaacggcgtgcgccgcgccatagacatagcgtatgcggcccgcagggtgttcccggaccggcggattttcctgatcggggacatcatccacaatccggaggtaaaccggcagctggaggaaatgggcattcagaagcttccctggaagcagcttgattcctcctatgaccggattgccgcggacgacgtggtgattattcccgcgttcggcgtgcccactcccttcatggatgcgctggaggaaaagggcgtgcagattgtggacacgacctgcggggacgtgatgaaggtctggaaaagggtgaagaattacgccgccatggggattacctccatcattcacggcaaggccacccatgaggaaaccagcgccacggcctcccgggccctgggggaacggggaaaggggaaatacctggtggtttacgatctggaggacgcccgcatcctgtgcgactacatgctgggccgcggagaccgcgaggcgttcctgaaacggtttgaaggctgttattccccgggattcgatccggaccgggatctggaggaagtgggcatcgccaaccagaccaccatgctgaagacggagacgcagacgctccagaggatggtgaaggacgccgtcgtccagagggacggggacgatgataatttttatgtgttcgacactatttgcggcgctacccaggaccgccaggacgccctgtacgagctgttgaagaaccctctggacgtcatgttcgtggtgggcggctacaatagttccaacaccacgcacctggtggatatcgccaaggagcatgtgcccacgtatttcattgaatccgcagaaagcatcaaatccatccagtacgtggatgcctttgacacggaaacgcgggaagtccgccgcatgaccacggaaccggtggtgcagaatctgggcaaatccctgaaggtggggattacggcgggcgcttcatgcccggccaacctgattgaggccactatcctgcgcattgcagaattgcgcaagtagcggcgcgcatccggagctggagggatgcggagaaatgggcacgccttccaccgggaaggcatctgccgtttttctcacgaaaacggagcggtggccgaacccgcgggagaggaaaacagagaaacaggaatacggcggaaaacggcgccgggcgggactccttaattttccaggtcttccggggtgacggaacgctgttcccgggaggcaagcagtacggcctgttccacgacgtactccgtattggagtcgaaacggtaggcgttgcagttgggacacacggcagtggtcagggacacgatggagccgcaggcttcgcaaaccttgaagtccccgggacggtcaataatcagtttggctttatccaggcgggattgctgcatgggaggggaaaataaaacaagccgctcagcagaacagagcggcttgccataaagatcgtcagaaaaccgaagtgaaaactcaggcgatttttgcgatggccttggcggccttgctcttgtagttggcggcgcggttggcgggaatggtgcccaccttggcggccttgtcaacggcggaggagaaagtgttataggcaacggcagcggcttccttgtcagacgtttccaccgcagtggcaatcttcttgcggagggtcttcagcttggaggacacagcgcggttgcgggcggtgcgggtttctgtctgacggatgcgcttgagtgcggatttggtattggccatgttttaaaagaggttcggtttccgtttcgaggtggcagaaacattagaataacaggacaaaatgtcaagctcttgatatattttttaaggcattcctcctaagcgcgggcagactgcgggctttaccggaaaaagggtttgtggcatcctgtgcctccgttatgaagaaacgcgtggatttgcctgaaaaaaaatatgaaggatatatttttgatctggacggcaccctggtggacagcatgccgctccattacaaggcatggcgcaaggccctggcccgtgcgggggcgccggaccgcgtgttcctggcggatgaattttattcctgcggcggtaaatccgccaacgacgtggtgcgttttctgaatgaacggtacggcatgcacatggatgctgcttctaccgctgcggacaagcgccgaatttatctggaaatgctggaagaggagggcatgcagcccatccgggaggtggtggaattcgtgcattccctgggagacgcccccaaggcgatcgccacgggaagcgccatgccgggagcgtcccggacgctggccgccgccggactttcaggtctctttgacgtgattctgacgccggatgaagtggagcatggcaagcctgcgccggacatgttcctgaaagcggcggaacttctgggggcatccccggaccgctgcgtggtttttgaagacgcggaacccggcatggaggccgccgcagccgccggaatggactgcgtgcacgtccgccgcgcgtccctggcctgattccctctccagcggcttccgcagaggggcgctttccggccttcccctcctcccgggatgcacgcctgcattttaatgaaaaggcttcacattacgcccggaatgcgctagaaccttttttcctattgaacaaataaaatattatttgcacatgagcacaaacgacaaaacatcatccgccccgacgaaaacccgcatgacaggagccgaagtgctcgtggaatgcctcgtgcgtgaaggtgtagacgtcgtctttgcctatcccggcggcgccagcatgccgattcaccaggccctgagccatcagcccaaaatccggaccatcctgccccgccacgaacagggcggcgcgttcggcgcggaaggctacggccgcgttacgggcaaggtgggcgtctgcatctccacttccggccctggcgccaccaacatgatcacctccattgcggacgcctatctggactccactccgctggtggcgattacggcgcaggtcatgcgttccctgatcggccgcggcgccttccaggagacggacgtgttcggcatgaccgcccccatcgtgaagcacagctatctggtgacggaaccggaagaactgccccgcatcatcaaggaagccttttacatcgcctccacgggccgtcccggcccggtggtgattgacatgcccaaggacgtgcaggaagccgtgtttgcgccggacttcgacatggagatggacctccccggctacaaccccgtgctgcccgttcccacggaaaagctggaagaactcattccgctgattgaaggcgccagccgtcccgtcatttacgccggcggcggcatcatctccgcggaagcctccgcggacctgctggaatttgcggaacgctcccagattcccgtggcgaccaccctgatgggcataggagccatgccggagacccaccctctttccctgcgctggctgggcatgcacggagccgtgtttgcgaacaacgccgtgaatgaagcggacctggtgatcgccctgggcgcccggtttgacgaccgcgtgaccggcgccgtcaacatgttctgcccggactccaccatcgtccacattgacattgacgccagcgagatcaacaaaaacaagaaggtggcgcaccccatccgcgcgaacgtgaaggacgccctccaggttctcaacgccgctctggccgctcaaggctgggaacgcaaatcctccggctttacccgcactccggaatggttcggagtgattgaagactggaagaagcagtaccccttctcctatgaagaccgcaagggctatatctccccgcaggccgtcattgaggaactctaccgccagacggcggacaaggatcccatcatctgcacgggcgtgggccagcaccagatgtttgccgcccagttcttcaaattcgacaagccccgtcgtctggctacctccggcggcctgggaaccatgggctacggccttcccgccgccatgggcgtgtgcctggcctgtccggacaagctggtggtgaacattgacggagacggctccatgctcatgaacattcaggagctggctaccattcacgtggagcgcctgcctgtcaaatgcatcatcctgaacaaccagcacctgggcatggtggtgcagtgggaagacctgaagtatgactccaaccgggcccagaccttcctggcggacccgcacgacagctatgaccccacccacaagacggaagacgtcatctacccgaactacccgctcatctgcgccggattcggcgtcaagtgcgagcgcgtgctccgcatagaggaacttccggcggccatcacccgcatgattgaatccccggaggcgtacgtgctggacgtaatggttcctcacgacgtgcatgtgctgccgatcatcctgggcggcatgagctacaaggacgtgattctggaacgcattgccggggacggctccgccaagaaggcgtccgaactgggcaaggaaattccgacggccctgtaaggaatattccgtcattcattcgttaacgggagccgtccgcaagggcggctcctttttaatggcagcggaaaccggaggggaattcggcttccggcaatggggaaaacggcacgccgcccgggaggcctgttgtttttgtgtctccatgttggcggctccggggatgcacggttctgtttgaaggaacatggaagatgttgctggacgcggcagaggggaacggctagcatcaatgaaccaagttgaatgcaagccggaccggacgcggcgaagatggaatattacggaataacgccgcgtctgatgccgccttgcgccaaccccaagctcacagaaaattcccgggagaccggcgcttgctgcaagtgattgggaaatggatattgacaaaagaatcacctcttatcggacctgaccgtatccggcttccgcatcaggttggcgcaaaccccttgctgcgcccttgatgctcaacccgtatccttcaggccgtcgcaccctcacgggtgcgtggattgaaaccttgtataaggcctcaagttcttcaaaagagtaggtcgcaccctcacgggtgcgtggattgaaacgatgaacccgtagagttccagcgtgccggaaggggtcgcaccctcacgggtgcgtggattgaaaccagctccttgattctggtctcctgttgggcgaccgtcgcaccctcacgggtgcgtggattgaaacagagttaaaccccttcaggccgccggaacccttggtcgcaccctcacgggtgcgtggattgaaactcgtcaactccgctctttgtaacgcggccaaggagtcgcaccctcacgggtgcgtggattgaaacccgggagccaagacaaagcggcttgtccatgtcagtcgcaccctcacggggtgcgtagaatgaatagtgcagttgtttttaatgatgtctgcatggtaagggaggtgattattatgataaatggttatttattgaatattcttttaaggaggatttttatgttggggaggacgccggatgaacaactttccggatggtttattatggtttccggacagcctgtccggaaaagggaagcaggcaagcggtgcatttcctgcggcatgggatttttttccgcgttcacagtttgtgatggatgaagccggagcaatccaatataaagataagatgcatatagactggttgaatgattttttggaatggacgcctattttgctgatggtgctggtagcggtcgtttttctggtggcgctgaaatggagaagcggcaggatgaagaagtttctggaggagtggaaacgtaagatcgtccggcaggcggaagccgggaatccctccgcccagttccgtctggggcgcatttaccaggagggggacggcgtggagaaggacccggaccgggcggaggattggtttcacagggcgttgcccgggttgaagcagaaggcggatgcgggagatgcggatgccgcctttgacctgtatgattgttttcatgaaggtctgggcgcggagaagagcgatacgcaggccctgcactggctgcagcttgcagcggagcagggcaagccggaggccatgtttgacctggccctggagtaccgggaaggcggcctggtggagaagaatgaggatttgttcatgtactggctgcgtaaggctgcggaagcggacgagagggacgcccagtacctgctggccgcctgttatgaacacggcaatggagttccgcaggatttgaatcttgcacgggaatggtatgaccgcgcggcggaaggaaaggattccggtacggaggaggatccggagcgcgcacaggggaaataggaggcggcgagcctctttcggctggacaaatggggaagcgggcgacactctaggcgtttcatggagggcatacgctattacaaccgctacacgggcagggaagaacgggaacaggtgctgggggagaagtacctgcaatggatttacggcacttccacaggccgggctgcactgcatgtcctgatcaagcgcggcgttttttcccgtctgctggggtggttgaagaaccgttcttccagcgcgcggtccatcccctcttttgtggaggagtacggcatcaatatggaggattccctcaaggggatgggagagttcaagcatttcaacgattttttctaccgccgcctgaaaccgggagctcgccctctggccggtggggaggatacggccgtttttcccgcggatgcccggcacatgggctgggaacgcgctgaccgaatcaagagcgttttcgtgaaggggcagagttttgacctgcccgcccttatggggagtgaagcgctggccggacggtatgcggaaggcgccgtcgttttgtcgcgcctgtgccccacggattaccaccgttttcattttccggtgtccggggtgcccggcccgtggacgaggctgggcggtccgctggcgagcgtgtctccgtactgcctgcgccgccggctggcgtggctatggactaataaaaggaatttgaccctgatccggtcggagttgtggggagaggtcgccatgctggaggtgggcgccaccggggtggggctgattgaggagacgtatgttccggacgttcccgccgcaagagggggggagaaggggtattttgcctttggaggctccacggtgatgtgcttttttgaaccgggcagaatacgcctggctcccgacctgctggaaaagacggcggaaggcatggagttgtttgcccgtcagggagatatgatgggcgtctctgcggagtagctgcggtccgggaaggggtgcggccatgatgtctccggattatgaatccggagtcaagcttacaaaattgaaagaaaaaggttttggagaatttgagcttgtccatatcatgggaattgtcagagggtgttcctgatgtaatgggctttcttttcgttccagtaatggttaataaccgtctttacgcttcggcggcgccctccatcagggcgggaggccctggctcccgggagatatgcggctgtgaaaggggacggtggaagtgtggatggattgtggctttgcggcactggcgcctgaaagcggcagagttcctgcttttcgttgttgaaactctttctggagcatagcggaagttttttttaatagccgtcactgcattccggtgagggcatccatcagagccgggaggtcctggactaccagacgatatgcggccgtaaaaagtgaatgtgggaaatgttgatggaatgtccatttggagttttttccagccaagccggagcctggagaaagacagcttttccggattgtagaatctttaacggattcataatccgctatttccttgggcaacgggttccattccgtatttcacccattaataagaataaatttatgaagtgcctatgtattcttggtgttctggccagcctggcaacggcacaggcggctactgtgttgagcacgacgaccaaggacgatccttccaccctgacttccgggggatacggagcctattacggtttttcctttgacctggaccacatgcttctttcctccggggaagggatttcaccgaattccacggtgttcctgcaatcactggatattgccaaggcgacgaacagaacggatgccaccgacgggctgtacgtgacgattttttcctccgccgctaccaaggacggaacgacgttcgtggggcagtccacgaccaccgttgacatggccggagatggcgccggagacggagcggcctcctgggagaaggccgtgttcaataatttgcagcttgatagcggcgtaacttattacgtggcttttacgacgacgcagatttcagatgccaccagttggggtgatgtgagcttttcctccgccaggttgaggcttggcaaggaagccgacggcgtggacatcggggatgtgtataagaatgcgggctttaccagtacggagggttccgtatggggaccggcgttgagggcggaagtgacgctggccgccgtgccggaaccggcttccgcctccctcggcctgctggggctggccgccctgctgatgcgccgccgcaggttctgattaacggagccatgaatgaaagagtccggcactcctcccgggaatgccggattttttgattttccggaataacgggctgggtaaggaccgttcgcaggttacttcatttccgcaatggcgcgggccatgtccggagccttgaaggtggaggagcccgccaccagcacgtccgccccggccagggcgcactgcgcggcattgtctttgccgattcctccgtccatttgaatcaggaaaggggcctggtgctccgtgcgccattcggcggctttttccaccttgtccagcacggagggcatgaaggattgtccgccgaagcccggcaccacggacatgaccagcagcaggtctatttcctccaggtagggaactacggcgtcaaagggcgtggccgggttgacggccagaccgtttttcactccggctttccggatgcgcctgagggtgtcgcggatgtagtgggggtcccccagctctacatggaagcagatgaggttgacgcccgctttgacaaagcggtcaaagtagtggtccggccgttcaatcatcaggtgggcatccaggaaacggtccggccccaccgcttttctgacggcggcgcagatttccgggccgaaggagatgttgtccacaaagtggccgtccatgatgtccaggtgtagccagtcggctccggagtcaaaggcacggcgcgcttcctccccgatgcgggagaagtcggcggccagcagggacggggcgatcatggtcatgatggcagagtctttccggggtgtcagttggctacgatgttgaccaggcggccgggcacgacaattaccttgcgcacggtgacgccgtccaggaagatttttaccttggcggaggccagggccagcttttccagttcttcccgggagatgtccctgggcacttccagcttgtcccgcagcctgccgttcacctggatgaccatgggaacggtgttttccaccagcagggcttcctcccagacaggccagtttttctggcagagctgcgtttccgccagggcggggaatttcgcttgcaggcggctgtgaatttcttccgtgagatggggggcaaaggggttcagcagcgtcaggaaggcgtcatagtcctgtacgtccaccacgtccgcggaggtcatggcgttggtgcattccatcattttggcgatggcggtgttgaaggacatgtcattgatgtcttccgtcactttcctgatggttttgtgcagttccttgcgcacggggagcacggcggcttccggagcgtccgccgccagcttggggttgatttcccattcgccttcctggttttcccggaaggccacgcgccagacgcgggccaggaagcgggagatgccttccacccccttggtggcccagggcttcacgtccttgaggggccccatgaacatttcatacaggcgcagggagtccgctccgtattcgcggacgatgtcgtccgggttgacgacgttgccgcgggacttggacattttctggccgtcttcccccaggatgaggccctggttgacgagcttctggaagggctcgctggtggtgaggtagcccaggtcaaagagaaccttgtgccagaagcgggcatagagcaggtggagcacggcgtgttccgtgccgcccacgtacaggtccacgcctccggggttgccggtggagcccatccagtattgttccgcctcacggctgacgaagcgttccgtgttttccggatccaggtagcgcaggtagtaccagcaggagccggcccactggggcatggtgttcgtttcacggtgggccgtgggagtgtacgcaatccattccgtggccctgaccagcgggccgcgggggtcgcccgtgggggcgaagtcgtccagatcgggctggagcacggggagttcgctttccggcagggcgcggtggcggccgtcttcccagacgatggggaagggttccccccagtagcgctggcgggagaagagccagtcacggagcttgtagtttaccttgcggcggcccttgccgttttcctccagccagaggatcattttttccttggcttccggagtgggcagccccgtcaggaagccggagttcacgctggcgccttcataaccgcagaagccgcgccagtcaatgtcttcactgggcggctggaccacctggagaatggggaggccgaatacctgggcgaaggcgaagtcgcgttcgtcatgggccggaacggccatgatggctcccgtgccgtaacccatcagcacatagtccgcaatccagacggggacctgttccccgttggcggggttgacggcataggctccggtgaagacgcccgttttttccttggagaggtccgtgcgttccaggtcgctcttggaggcgcactgggcgcggtactgttccacggcgtctttctgttccggcgtggtgatggtgtccaccagcgggtgttccggggagaggaccatgtaggtggctccaaagagggtgtccggcctggtggtgtaaacggtgatggttttcccgttcagggtgaagtccacttccgccccttcagatttgcctatccagttgcgctggagcagtttgatggattccggccagtccagcggctccagttcgtcaatgaggcgctccgcgtagtccgtgatgcgcagcatccactggcgcagggggcggcgttccacccggtggcccttggatttccattcctccacttcctcgttggccaggacggtgcccaggtccggggaccagttgacggccgcttccgccacgtaggccaggcggcgctggtcgatttcctcccggctcagcccctgttcctccagttcggagacggggcgcgcctttttcagttccctgttgtagtaggagttgtaaagctggagaaagatccactgggtccagcgcacgtattcatggtccgtcgtggctatttcccggtcccagtcataggagaagcccagcatcttgagctggcggcggaagttgtcaatgttttggaaggtggtgacggaggggtgctgcccggtcttgatggcgtattgctccgcgggaaggccgaaggagtcccaccccatggggtgaaggacgttgaagccgttcatgcgcttgaagcgcgccacgatgtccgtggcggtatacccttccggatggcccacgtgcaggcccgcgccgctggggtaggggaacatgtccagcacgtagtatttgggtttggacgcgtcaaagcccccttctccgggattgcttactttaaaggttttcctttcgtcccagatctgctgccatttgggttcaaaaacgtcaaagggatatggtttcttgcgctcggacatgatggggaggaatgtatactccgcctgctggccaatcaagcctaaacccggtggcgcaaaagcgtttccgccgcttcccggaggatgatgcctttttccggaaaaaagaggaaagaccagaggttgcttgtgcgtatttttaggttgaaaggattttgacgattatattaaatatgctgcgaccatgaagttctccgcctgtctcctgtccgccgcctgcggcgcgttttccctgcttgccggggcgtccgcccagagcaatacttcccaccccgtttccggaaagaagcccaatatcatcgttttcctggtggatgacatgggctggcaggatacgtcccacccgttctggtccgacgaccggggcaacccgaagaagacgttcctgaacaagcgctaccgcacgcccaacatggagaagctggccgcgcagggcatgacgtttacggatgcgtacgcccatcccctctgcacgccttcccgcgtgagcctgatgtccggcatgaatccggcgcggcaccgcgtgacctgctgggtgagggagcagaacggaacgacggaccgcaacaacaaaaatctccagccgccggactgggccctcaacggcctccagccggtcgggattcccgcccgggggacgacgaaacgccccatttccggggaagacatgcattacaacatgacgcgccccttcgtcacagcggccacgctgccggagatgctgaagaagtgcggctacgtcaccgtgcactgcgggaaggcccatttcggcacccagggaacgccgggatccaacccgttgaatatggggtttgactacaatattgcgggtacggagatcggtcacccggcagattaccgcggttccaagcattacggaaaagggttcaaccatgtgcgcgggctggatgagaataattattaccaggacgacgtatttttgacggaggcgctgactcttgaggccctcaagcggctggaagccatcaggaccaatccgaaggaggccggcaagcccttttacctgtacatggcccagtacgccctgcacgccccgctggatgaacgcgcctacgacaagaggtttgcggattcctacaagaatccggaggacgggcacaagtggtctccggtggagaagcattattccgggttgatcgaggggatggacaagagcctgggggatatcatgaagtacctcaaggagcatgacatggacaagaacacggtgctggtgttcatgtcggacaacggcggcctggccatttccggcaggctgggcaatgaggacgccaattatcccctttccttcggcaagggatcgtgcatggagggcggcatccgggagcccatgatcgtttcctggcccggcgtgacgaagggcggttccaggtgcgctgttccggtggtgattgacgactttttcccgacccttctggatatagcgggatgccggaacgccaaggttccgcagaagctggacggcctgagcctggtcccgctgctcaagggaggccggttccctgcggaccgtcccctgctgttccaccagcccaacaactggggggaaaacaatcgtcaggctcctcagtacggcgcttccaccgccctgcgccacggggactggaagctgatttaccgtcacgggaaccagagctttgagctgtacaatttgaagaaggatatcggtgaaaaggaaaacctggctgccagggaaccgcggaagttgaaggaaatggccggcctgatgggcaagctgctccgcgagcggaaggcgcagatgcccacctacaagaagggtaatgaactgggcgcgccggaaggaagctccgttccgtggcccgaccaggtgaagaagggcgggaattgagattccgcagcagtttccggtttcttttccatcagggccggcagatgtgcctctggtgaaggcgggtgaatgggaatgccctgcttccggcagggcattcagcttgtgaccgcctttgccggaagggcagtttccccatgaaacgggctgttcacaggcgcttttctccgcgccgcgttcctgttctgaaaagacttgcggtaagagccgccaatttctgcggcttccgcatgaacaggcggacggagggcgtacgctgttttgattaacggacttttttcaatatccgttcgctggccctcagtttcttttcatctgccgcaaaggcttgcggcgctccatgcggtccgcgtggaatcctccgggcttttcaggcaagccatttttccgcaggctgtccatggaaaaacacgggaaaacggcgtattccccgggacggccattctgcccccatccgggcagggagcctccctgcctttcctgcggtagcttttccgatattcagcggaggaagtttccccttcccggaaatacggtcccgcttaaaaacgcattttttccattctcttttttcaggatggggagaaggtgaaaataacggcaaacttgcttttgttccggaggaacggggataaaaaacgctccgccgtacgtgccggcggagcgtgatggaaattaaggcgatggcatccccggaaggggaggcatcttaaaagtcgtcggaagcggcgtcatccgtcgccgtggcgtcgccgccttcagtcgcgttatccgcagcgggagtttcttccgttccggtagcgtcttccgcaggagtttcctccgtcgtgccgggttcggcagccggagctgcggcaggcttggcggcgggggcggcagccggagcggtttccttgggaggaacgaccaccttcacggcggggggcgccggaacgggcgtttccaggccgtcagccttgcgtgtgctgacgcggaggccgtccgcataggccaggtttttcaggatggcatagcccagggcgggagcgcggtccgtcgtgttgaccagcatcttgaagtggttgttgacggacatcttgcgggcgtccctgccattgcggaagggaatgatgcccaccaggttgccgtcattgtcaatgcagatcgcccagtaggagcggtccacctggatgaagtactgcggacggatgtagtccatcgttttccattcggctcccttgatgtattcctccatggcgcggcgcgcattggccggcatgccgccccagtcggcgtaaaccctggtggtcagcgtttcacggccgttgtacccgtgtacggaaacgtgctgggcagtagcgaattgacgggcgtagctctcgggagaggtaggttggcaggagctggtgaagagcgctgctccggcggtcaggatgcaggctgctgcagtggtgaagggatgaatgttagtcatggcaatcgcaatggttacgttataaaagaggaaaacacatcccatttcaaggaaaagaatgcaggaagtgccgatttgtggcgttttttgacgtttccgtttgatgaggggaaccgcgcaggcgcggcggaagcctttcatgcgtgccgccttgagggtatgatggtagattactcaaatttttctcgcaaatcgttctgaatcgcttaggttgtcgttgctttatgtccgccttcgtcatcagcgagtctgccctggaacgcaacgcccttatcctgagggatgtggcggatgccgccgggtgccgtatcgtgctggctctgaaaggtttttcctgctggccctgctttgatgccctgtccccctggctggacggctgctgcgcgtccggcctgtgggaggcgcggctggcccggcgcaggttcgggaagcatgtgctgacctattctcccggctatgcttcggaagaaatagcggagctggcggagatttccgaccaccttgattttaacagcctgacgcagtggagccgcttccgggaggaggtgatgcggcatccccgctttctttccggggaactgaagtgcggcttgcgcgtcaatccccggttttccaccggccacacgcccctgtatgacccctgcgcgcccggctcccgcctgggcgtcacgccggacgtcatgcagggggcggatttggccggtatttccggccttcatttccataccctgtgcgaacagggggcggatgacctggcggctacgctgggcgcggtggaacggcacttcggccacatcctgtcccgcccggagatgacgtggctgaacatgggcgggggccattggattaccaagcccggctatgaccggaagctgctggcggagctcgtccgccgcattcgcgagcgctacggggtggaggtctggctggagccgggagaggccgcagccattcataccggcgtgctgcggtgcagggtgctggatattttttcctcggaaggggtggagcacgccgttctggatgtttccgcgtccgcccacatgccggatacgctggaaatgccctaccgcccggacgtattccagattgtccgggacgcctccctccgttccgcgcggcagcccgccgtgcagatggccggggagagctacgcgctggcggggaacgccggggagggctcccatacgtaccgcctgggcgcgcccacctgtttggcgggagaccggataggggattattcctttgcggagcccctggcggcgggcgacgaacttgtgtttgacgatatggcgcattatacgatggtgaagaccacgtttttcaacggcgtgcgccacccggacatcgccgtccagaggaaggacggctccgtggagacggtgcgccgctttacttatgaagattttgaagcccgcctgggctagaacatttgaccagacagattgacatggcagcagctaaagaaggcatcaagcagaaagtccggggttggagtcatcatgattccgcagatttgtacggcattgacgactgggggaacggttatttccggatcaacaagaaaggggaggtgaccgtacgcctgaacgacgaggacggcgggaagaaggatatcagcctgtgcgacctgctggaaggcctgaaggagcgcggcaccaccgttcccgtgctgttccgtttccgggacctgctgcgcagccgcattgcggagctgaacgacagcttccggaaggcgatcaaggaagcggattaccagggcaagtaccagggtgtctaccccatcaaggtgaaccagcagcggcaggtggtggaggagatcgcggagttcggcaccaagtatgattacggtctggaggccggttccaagccggagctgattgccgccatggcccacatgcacaatccgaatgcctacctgatttgcaacgggtacaaggatgacgagttcattgacctggcgctgacggcccagaagatggggctgaatattttcattgtgctggaaatgccttccgagctggacgtgattctggaacgcgcccggaggatggacatccgccccaatctgggcgtgcgtatcaagctggcggccaaggggtccggcctgtggcaggagtccgcgggggacaagtccgtgttcggcctgaacgcggcccaggtggtggacgtggtggataagctgaagcaggtggatgcgctggattgcctgaagctgctccattaccaccagggttcccagattccgaatatttccgtggtgcgcgaggggctgacggaggccgcccgcatttacgtggacctggtgaaggagggagcgccgctgggcacgctggacatgggcggcggcctggccgtggattacgacgggtccaagacgaatttccattcctcctgcaactattccattgcggagttcgcccgtgacgtggtggaggtggtgggggatatgtgcaccaagtacgaggtgccccatcccacgctggtgacggagtccgggcgtgccgtggtggcctattattccgtgctggtgttcaacgtgctggacgtgacgagcgcgccgggcgaggaaccgccgcccgagctgccggaggatgcgccggagctgttgaaggcttttgcggatacggaccggaccctggccaggaagaacatgcaggagtgctacaatgacgcctgctattaccgggaccagctgcgcgcccagtttttttacgggaacgccaccctgcgccagcgcgggctgggagaggcctattactggcacatcctgagccgcatttcccgcatgctggcggagatggaaaccattccggaagacctccgggagctttcctgctccatggtggacttttattacggcaatttctccctgttccagtccctgccggattcctgggccatccgccagcttttccccgtgatgcctctgcaccgtttgaacgaacggcccacgaacaaggccgtgctggcggacattacctgtgactgcgacgggaagatagaccatttcatcgaccgtgaggacgtggctaccgctctccccctccatgccatcaagcccggagaggacgattattacataggcgtgttcctggtgggggcctatcaggagaccctgggagacctgcacaacctgctgggggatacgaacgtggtgggcgtgcacctggaaggcggccgccccgtttacacccatgaagtggagggcgatacggtggctgacgtcctttcctacgtggagtatgaccccaaggagctgatcaacaagttccgcacgtttgcggaacaggccgtagccgacgggaaaatatcgccgtcagaacgccggagggctctggaagtgttccgttccggcctgaacggatatacctattacgagctgtaggaaacggccttttttccatgccccggcagggaaaagggccttccgttccaaagcgtttttctctttgcccatcaggccgccggcggttcttccggcggttccgtctccgcaatgaccttggccggcgtcagcccccagaagcgcgtggccgtttgcggggaaatgcctttcatgttcaggtaccgcgtgcggagcagggaggaggagcggtggcccatttccatttgcagcaggttgtagtccttgaagtgcttggcgtgatagctggcataggtatgccgcaggcagtcaggcacccatgatttctttcttccgccccagccggcttttttgcggattttgcgccacttgatcgtccagcccttcgggcagatgggcgtgccgggtccgggcttgcttttgtcacggcagaatttgagccatttggcaagcacgggcaggatggtgacgtgtctggcgcctccggtcttggtatgcttggagttcaggatcacgcagccgtcgcggatggcgatgttttcccagagcaggcgttccacttcctgcggacggatgcccgcaaagatcatcagggccgctccagccacgcagcttccgtcaaattcatccatgcacgccttgagaagctgggtcacttctttcagcgtcagggcgggaatttcctgctcccgcaggaagggcgtatccacgcggaggatggggttttcatcacaccatccgcgcttgacggagaaggagaagatgccgctcaggatgagcctcgccttgtgcctctgacgggacgtggtgaaggtgttcatcaggatgctctggcattcctccacgctcaggttccggaggggcgtgtgctccagttccgggttgctcttcttgagcttgtggatgatgctcctgatgtccgtcagcgtccggggacggcgatggcttttggaacgcaggcattccacggccgccgtaccgaagctgacggtatggtgtttgttcttgatggcgttcagtcccagggagacgacttccctgcaccgggtgatggtgcagatttcatctcccagggcctccttgatttccaataccagccttgcagcctggatcagggtgactgattccccttccagaagcgcggctccaacgtatttcaacttatttgtattcggtgcttttctcatactcattcctcgtgtttgtacaaacacggttttaatgaaaaaggccatccttatagtaaagaaaacttatgctttccatcggaaaacgcgtaaccgtaaaggatatgttgttacttatgttttctttgatccgatcggaaaatcaaagtttctggtagtgcaggaaccgaaaatgttagaaagcatggttatgttcatgaatgtcaaattgaacactatccatttgacgccaataaattcttgttagaagaaggggagaactcccccgcaggatgaaagtattttacatgcctgaacgtatgagataaattattccgctgtaccatgaacatcagaattcactctttcaacgtatcgtgtgccgggctgtgctgcgccctgggctcctttctggcggctgatgcccgtgaggtccattccctgaacggctcctgggattacagcttcaacggaggctcttccgggaaggtggcggttccccatacctggaatgcggaggatgccgcggacggcgtgaaggggcagcgcggagacgccaagtccgtcaacagcgacgcctaccggcgcggctccgccgtttattcccgcactcttccggtggcccccaggccgggcaagaggtatttcatccgcggcggaggcgccagcatcgtttccgaggtttccgtcaacgggaagcctgccggcaggcatgagggggcgtttaccgctttctgttatgaaatcactcccctcctgaaacaaggcgccaacacggtttccgttctggtggacaatacgcagcgggaacatatagcgccccagcgcggggatttttccatgttcggcggcctgtaccggcccattgagctgattgaaacggacggcgtgtgcattgaccccctcttttacgcctcccccggcgtcttcattacgacgaagtccctggataagtccaaagcggaggtggaagtgaagaccctgctgaactcggacgggaaggcgcgggacgtggatgtagccgtggaaatcctggacatgaagggcaggaaggtggccggaaagacggtgaaagccgccgccggggaaaagaagaacctggaggttcccgtaacgctggcgatcgccaagcccgtgctctggaacggagtcaggaatccctacctctaccaggtgaagacttccatcaggacggcggacggccagacggacgaaatagtgcagcctctgggcctccggaccgtttccgtcgatcccgggaagggctttgtcctgaacgggaagcccatgcaggtcaagggcgtcagccgccaccaggacatgaaggggaagggctgggcgctttctccggaagatgaggcgcgggacatccggctgattgcagacatgggagcggacggcttgagaacgggccactatcccgcctccagtaatgtttacgacctgtgcgacaagacggggctggtcgtctggtccgaggtgcccaacgtcaacctggtgcgtgatacgccggagttccgggagaacaaccgcctccaggcccgggaaatgatttaccagcactggaaccacccctccatttgcatgtggggcattttcaatgaaatcggccaccagccggaggcttcctccaaaggggtggacatggaggctgaattgacggaactgaacaagttcgtgaaggagacggacccctcccgcatgacagtggcggccagcaaccaggcgggccgcaagaagctgaacaatattccggaccacatcgcgttcaatacgtatcccggctggtacgggggcggcccggaaaccatgaaggggaacctgaacggctacatccgcgattacggcggcaaaatgggaatcgccgtcagcgaatacggccatggcgccagcacgggcatgcatgagaatccggccaaaaggccgtcccccacggggttctggcatccggaggaatggcagtcccaggcgcatgagatcaattacaagtgcatcagggagaggccggaggtgtggggctcctttgtctggaacatgtttgacttcggttccgcctcccgctttgagggggaaagccccggcatcaatgacaaggggctggtgacctatgaccgcaagacgcccaaggacgcctatttcttctacaaggccaactggagtccccagccgactgtgtacattacgtcccgcaggtttgcggagcgcacggaaaagacggtgcccgtgaaggtttacagcaatgcccctgcggtgaagctggccgtcaacgggaaggccgtgggaagcgtcaagccggatgaattgaagcgcgccgtctggcctgaagtgactctcaagcccggtgtcaacaccatcacggccacggcctccgtgggcgggaaaacgtacacggattcctgcaaatggaccttgaagccttccggggaggaaggaaagaaggattccgagcgctatcaggacccttccatcaacaagtacaagtaagcaatccagcacctgacccgagatgaagacggtacgagcattcctgttttccgtgatgtgcctggctccggcgcttcccctgctgggggaagccccggactgggagaatgaagaggtgacgggaatcaacaaggaggctccccgcgcctccgttctcccggcgggagacaagacgctgagcctgaacggtgactggaagttcaagttttccatgacgccggacgggaggcctgccgatttcttcaagccttcctattccgtttccggatgggatacggtcaaggtgccttccaactggcagcttgcgggctatggaacggccatttacacgaacgtcccgtatcccttcaagccgaatccccccaaggtgatgggagagccgcccaggaactggccggcatacaaggagcgcaattccgtgggctcctaccgacgggatttcaatctccccgcctcctggaagggggagcaggtaatgatccggtttgacggggtggagtccgccttttacgtgtgggtgaatggccggaaagtcggctattccgaggattcctatacgggcggcgagttcgacctgactccctatgtgaagccgggcaggaacacgattgccgtggaggtgtaccgctggagcgacggctcctatctggaggaccaggatttcctgcgcctttccggcattttccgggacgtgaccctgttcgcccagccgcaggtgcacgtgcgcgacctgttcctgaaggcggggctggacaggaaggattacacgaccggggtgctggacggaacgttcaccatccgcaattccggcaagaaggatattcccgccggaatgaagctggattattccattgaagggatttccaccaatttaaattgggagggcgcgagcggctccggccgcgtgcagacggacaacaggggcaggctggattccggcacgctggaagttcccgccattcccgccggaggcgaggttcaggtggctctggacaggaagtttcccggcgtgaagccgtggacggcggaaacgcccaacctgtacaaggtgacctattccctgaacgggaaggacccccggtccgtcaatatcggcttccgttccgtggaaatcgccgataacggcgcggtgctggtcaacggaaaggccgtcaagttcaagggcgtcaaccgtcatgaagcgcatccggactacgggcgcgccatcccgcgggaggtgatggaaaaggacgtgcagatcatcaaggcgcacaacatcaacaccgtccgctgctcccactatcccaaccatccctatttctacgaactgtgcgaccgctacggcctgtacgtgatggatgaagccaactgcgaggcccacggcatccgcaacagcggcatggatatttcccggaagccttcatggaagaaggcgcatgtggaacgcaacatgagcatggtgcaccgttccaagaaccatccctccatcgtgttctggtccctgggcaacgagtccggcaacgggccgaattttgaagcggcctcggaagccatcagggcctatgacgatacgcgccccctccattactgcgaattcccgcacggccataaggccgtggacatggattccgccatgtatccgcccgtggaccgggtggaaaactgggggaggcagaagacttcccgccccttcttcgtgtgcgaatacgcccattccatggggaatgccctgggcaatttcaaggagtacatggaagcctttgagtcctcccctcgcatggtgggcggggccatctgggattttgtggaccagtccctccgcgccaaccctgccgggaacggcatttacaagcccgctcccttcaagggcgtgacgcaggcctacggcggcatgttcggggacaggcccaaccaggccaatttctgcgacaacggcatcattctgggcaaccggaacaccacggccaagacgaaggaagtaaagaaggtgtaccagtacatggcctttgaccgcaaggacggttccctgaccgttcgcaacaagtatttccacaagccgttgaagggctatacgctttacctggtgtccctcgcgcccggcggcaagcatgccgtggagcgcatggctctgccggagacggcccccggcaagtccgtgacggtgaaactgccttccgccgccatgcagacgggctccctgatggttctggcggacgcccggttcaagctgccggaagacgtgaaggagctttccgccaaacaactggagcatgtggcggacgagtgcgaagcttacgagtggttcccggcggccgtggagaaggaggcttccgtgaaggctccggcggcgctgcccgccgtctccgtgcgccagggcgatcccgtggtggtgcaggggaagggcttttccgcctccttcaaggacggcatgctttccgccctccggtacggcagccaggacctgattctgcccggctatccggtggcgctccaggcgtaccgttccccggtggacaacgacgcctggatcaggagcaaggttgaggggaagatgaagatgcagaccatgaaggcggagtattccgatgtgaaggccgccgtcatttctcccggcgtggcccgcattacggcgcaattccggacgaaaggctccggcctttccttctccggggaggttgcctggacggtgttcggcaacggcgtcatcaatgcctccgtcagaatgtatccctccgccaagggggaagagctcctgcggctgggcgtcaccttcgggatgcctgccgcctatgaccaggtggaatacctggggctggggccgtgggacaattaccgggaccgccgcacgagctgctggaaggacgtgttccgcacttccgtggacgacatgttttttgcctattcccgcccccaggacatgggcaaccgcatggagacggactgggtggccctgtccagacccaaggcggctccggcgctgtgggtaggctccgcctctcccagggccccgctggaagtgtccatcctgcgttatacgccgaaggagctcaacaacgccaaaagcctggacaggctgccggagaaggacaaggtggtcgtgaatctggacgccttccagatggggctgggcggttcctcctgcgggccgcgccccctggcgaagtaccagacgctgagcgaagccacccccctgggctttgtgctggcccccacgtccgccctgctgaacctggcgcgcgcgggactgggcgtgccccattcccccgtgattgaacgggacggggacggcatggtcagcctggtttcctccacgcccggagcggagatgaagtattccgtcaacaagggaccggaaaaaacgtaccggaaacccttcaagcttcccgaaggggaagtgagggcctgggctgccgccggaaaatccggcaaggtgcctcccacgtctcccggcgagcggaaattccccctcgtcaaggggcagggcgaatggaagatcctgagcgcttcctcggaagagccggataccggcttcgcccacttcgccattgacgggaatccggatacctgctggcacacgtcctatacgaacggcctgccgggcttcccccactccattgccgtggacatgggaaccagaatgaagttcaccggattcatctacacgcccagaatggacaaggacaagggcctcatcagccagtacacgttctccgtttccgatgacgggcagaactggaaggaagtgaaaaaaggccagttcacctaccattacatccggaaggatcccgccgttcagcgcatcgacttcggcaagcctgtggaggcccgctatttcaagctggacgcccgctccccggtgaagggcggcgagcagagcgccactgtggcggagttgaatatcattacccagtagcggaccggcgcaagcgccgctttcctgaaggaaggctttttccagccgtgcagcccggaaggggtgcacggctttgccgttgcggggctacaaggcgcgggaatgttttttgattgaaagaaagaatgccgcggtctggtagtatgctcatgcgcaagatgattgcttacatgctgggcgccgccgttctgtgcctctccgcagccggagcggaaacgcccgtttccgtcgctggggaagctccggccccctgcaagaggatggtctggaaccgcggctgggagttccggctggaagacgagcccggaaagagcggctggcagacggcgcatctgccccatacgttcagcctgccctatttcatgtccgattccttttacacggggcgcggctcctaccgcaagaagctcgtgatgccggaggaatgggtggggcagaaggtttttctggattgcggcgcagccttccaggtggcggaggtgacggtgaacggaaaggccgcaggaacgcatgaaggagggtatacggcgttccggacggatctgacgcctttcctgaagcccggagagaattgggtggaggtgcgcgtggacaaccgctggagtccccgcatcgccccgcgggcgggagagcataccttttccggcggcctgtaccggaacgtgcatctgaacgtgtgttctcccgtgcatcttcccgcgcacggcgtctgggtgcagacgccggaagtgactccttcctgcgggaaggtccgcatcctgacggaggtgaagaatgattccccggaaatgaagaagttttccgtgcgccacacggtgcgcgaggagaagggcgaccgtgtggttctgcgcggggagaagcccgtggagctgggcgcgggaaaggaagcccgtgttcagacggacctgcccccgctggccgctcccaggctgtggagtccgtcagcccccaacatgtaccgcgtgacgacggagctggtgggcgaagggggaaaagtgctggaccgggcggagaatcccctgggcttccgcaccctggagctgacggcggaccggggcatgctgattaacgggaagcccgtttacctgcaaggagccaacgtgcaccaggaccacgcaggatggggggatgccgtgacggacgccggagcgcgccgtgacgtgctgctgatgaagaacgccgggttcaatttcatccgcggctcccattacccccattccccggcttttctggacgcctgcgaccgggaggggatgtgcatgctgaatgaaggcattttctggggcatgggcggtttcaaggagcacgacaggtactggaattgcgacgcctaccccacggacgagaaggaccgcgccgcgtttgaggagagctgcatgcgccaggtgagggagatggtgctgcaattccggaaccacccttccatcgtcatctggagcatcagcaacgaaccgttttttacccggcatacgccggaggccagggccctgtgcggcaagctcattgccctggtgaaggagctggacccgacgcgccccgtgtgcgcgggaggtggccagcgcggaaaattcgaccagctgggggacatggccgcctttaacggggacggctcccacgtgaagacgcccggcaggcccagcatggtgacggagtacggttccgtgagctgcaagaggccgggggcgtatgcgccgggctggggggatatgaagaaggacaaggaggcgggagtgcgctatccctggcgcgtgggggaggcggtctggtgcggttttgaccacggcagcatctggccctccggcggccgcatgggcattgtggattatttccgcattcccaagcgggcctggtactggtataggaatgagttcaggaacattcccccgccggaatggcccgtgaagggaactccggcgcaggtgaagctgtccgcggacaagaaggccatcagcccggctgacggcacggacgacgtgcacgtgaccgtgaaggtggcggatgcctccggcaggcaggtagccaatgccgttccggtaacgctcacggtggagtccggccccggggagtttcccaccggcaagagcatcacgttcacgcccgggacggacattgacctcattgacggctgcgcggctattgagttccggtcttattacgccgggaaaacggtcatcaaggcgtcttccccgggattgaagggggacagcatccagattgtttcccggaacgccccggcgtacgtggcgggcaggagcgcggaaacccgggagaggccctacaagcgttttaccgcgcaggagagggacgcccaggtggcgcggtacgggcagtccggaaccggagccggagagaaggcgaacctggcggttttgaggccttgttccgcttcctccaatcttcaggacgcgatgaaggcgtccgatggcgacggcgcttccgcatgggtgccgtccgcagaagacagggagccatggtggaggctggacatggagtttgagttcagcctggaccgcgtggaggcgaaagccgccggaatatggaaagggcagcctcccgtggtgcaggtcagcaaagacggcaaaacctggaaggatgtgaaaaccgttcttctgaaggacggggccggattgaccgccgcgtgttccggggaggcgaaggccaggtatgtccgcatccggctgtcgccggggcaggggattgcggaagtggccgtgtggccggcggatgcctcatgagggggcctgttcctccggagcggggggctttttccggctcctccgcgtgccggagcttccggaatcctcctctgcccgctggcggcgcagtttgtcccagtatgccagccgcttgttgatttcccgttcaaagccccgttccggcggcttgtagaactggcggcggggcattttgtccggaaagtagttctgcccggaaaaggcgtccggcgcgtcgtggtcgtacgcgtaattttttccgtagcccagctccttcatcaatttggtgggagcgttcaggatgtgcgccggaggcatcagggagccgtattccctggccgccttccgggccgctccccaggcggtgtaggcgctgttggatttgggggcgcagcccaggtagatgaccagttccgcgatcgccagctctccttccggagagcccaggcgttcataggtgtcccatgcggcaatggccatttgcagcgcggcggggtccgccaggctgatgtcctccatggcgaagcgggtgaggcggcgcagcaggtagagcgggtcttccccgccctggagcatgcgtgcggcccagtacagggcggcgtccgtatcagagccgcgcagggacttgtgcagggcgctgatgaggttgtagtggccctcccggtccttgtcgtaaaccggggcgcgctgctggacgattttcagcagggccggcgtgtccagcgtctcgtcaggcttgcagaggtcaaagacgctttccatcaggttgatgaggtagcggccgtctccgcccgccagttcaatgagggtggcgcgcgcttccggggcgagcggcagcttgcgctggagaagggattccgcccgctcaatgatgctttccagcgccggagcgtccagggaatgcatgacgaagaccttgcagcgggagagaagggcgctgttcagttcaaaggaggggttttccgtggtggcgcccacgagcgtgacggttccgttttccacgtatggcaggaagccgtcctgctgggcgcggttgaaccggtggatttcatccacgaagaggagggttccctggccgtattcccgccgtttggcggcctcgtcaaaggctttcctcagatccgccatgcccgagaagacggcggagagcgcgacgaagtgcatggacgtgcgcgtagccaggatgcgcgccagcgtggtttttccgcagccgggcggcccccacaggacgaagctggtcagcttgccggaatccgccatgagccggatgggccctccctcccccagcaggtggtcctggcccacgatttcctccagggcggccggtctcaggcggtccgccaggggccggtccgcgaaggcggcaaacaggcccggcgtgtcgtcttttttcatgctcatcatcatacgccgcgggaaaaaggaaggcaaggggcgcatcatggcatttcaggcggagcggacgggctggcgtgtcatggagcgggtgttttccggactcttttaacgggattaaggaaaaggcgggaagaaaaggaaagactcccgggagaagtggtgtatactgaatacgatgttccgctatgtttcccctgtattccttttcctgctctccggagtgtgctgcatgcccgtgaacgcgcaggaccagatcattccccggcccgtatccgtcaaggttgcggacgggaacgcggcaaagcccgtgaagctggatggaggcacgcgcatcgtgtgccgggagaaggacgccgggttccagcggcaggcccggctgctgcagcagtttttatcacgcggaacaggactgtccctggcaggggcggggggcgcagaaactatccgcattgagaaggatgcttccctgaaacagtacggaccggaggcttaccggctggaggcggcgcctggaaatatcgtgatcaaggccgctgctccaaaaggggtgtactacgccgggcagagcctggcgcagatgctgcctgccgcgttttttgacggtggagcggacaagggcgccgtaagctggaccgtggcggagaagcctttttccatgctggattacccgcggtttgcgtggcgcgccttcatgctggatgaagcgaggcatttttttggagaggaggaggtgaagaggctgattgaccagatggggcttctgaaaatgaatatcctgcactggcatttgtccgacgatgccggatggcgcgtccagattaaaaagtatcccaagctgacctccatcggcagcaagcggagagacacggagatagagacgtgggggagcggcaagtatgcgggcaggccccatgaaggtttttatacgcaggagcagatcaggcgtattgtgagctacgcggccgaccggaacataacgattgtgccggagatagatattccggggcattccgccgccgctacgttttcctatccggaattgaagttgtccgccaagcccgtgacggagattcccgtgagcttcaatgacggaactgcctttgatcccaccaacgagcggacctatcagtttctgggagatgtcatgacggaactggtcgccctgtttcccggcggcatcatccacatcggcggggacgaggtgcgctataagaagtactgggccgacgtaccccacattgagcagttcatgaagaagaaggggatcaagacattccctgatcttcagatcatgtttacgaaccggatttccggcatgctggcaaagaagggagtacggatgatcggatggaatgaaattctggggtccgacgtgcacaatgacggcggccagggggccgctctgggcaagctggacggtaaggccattattcatttctggtgcggggccgacaaaatagccgccaaggcgatccgggaaggccaccaggtggtcaattccacttcccgcatgacttatatgaataaggattacggccagcttcccctgtccaaatcctattcctttgaacccgtttttgcggggttgaagccgaaagagcagaagaatgtcatcggtcttggctgccaggtctggacggagtggattgcggatgtggaaaagctgcaccgccgcgtttttccccgcatagccgcttatgcggagacgggctggagccggaaggaggacaaggattttaaggatttccagaggcgtctgccggggtatgagaagattctggatgtcctgaacatcaagcacggggaagggaagtaatccaaatcaccccgcagcggtccacgccccgttgcgcagcggcgtttcttccggcaggggcgtgttgggattttcctttccggcggggctgtgcccgggcgattgttttatgtcgttccgagtgttcgcgaaggcgagggcgtgatctccggagatgcgggcgccttgcatgaggcgatgactgtctttttccgaagaggccattttcgctttcagctccggtcggtgggggatggagcgttttttcaggaggccagccatttttaacggttggtcacactttggcatagtgtcaacaaaaacggggaaaccggcctccaaccaaccatgggccagcagtttcaaaacctgccaatgcccgcttttagcaattaaatatagattaataaggagaataagacgatgtccctgatatcctcgcattatcatcagctgtatacgccggaagacgctgccgtagttttcattgaccaccagccccaaatgacctttggcgtagccaacatcaaccgtgccgatctgatcaataacgtcaccctgctggcgaaggccgccaagctgttccaggtgcccaccgtgattacggccgtggaaacggagggcttttccggctatgtctggccccagctcctggatatttttccaggccagcatgtcattgaacgcacgtccatgaattcctgggattccgacgagttccggaaggccatcaaggcgacgggccgcaagaatatcctccttaccgggctctggacggaagtgtgcgtcacgtggccggctattgagatgatcggcgacggttataacatttacgtggtggaggactgctgcggcgccacctccaaggacgcccagaaagcggccctttcccgcatcgtccaggcgggcggcacgcggctgacgaccatcggcgcccttctggagttccagcgcgactggaagaacaaggaacattacgacgccctgatgaatctgctcaagcagcagggcggcgcttacggcgtgggcgtggagtacgcctacacgatggttcaccatgctccccagtccgccctgtccccgcaggtggtgaagcatgacgcctgattgcccgcagagtttttccggcgctccctccgttaacacgggggtgcgcgccggaagaaaaacctgaacattcatcaggcatgaacgccatcaatccttcagaggaagtgaccgttgtggtgcgccggcatattctgccggggcatgaaggccagtttgagcacgccatgcgggatttcgtcaattttgtgctgagctgccccgggcatgtgggcatcagcgtcctgcggccctccgacggaaacggggagtatgtggtggtggaccgtttcgcgagcgccgccgccagaaaagccctggtttcctccccggagtacgaacgctggatgaagctgctgggagcccatacggaaggggaggcccatatccaggagatgaacggcctggacgcctggttgaaccagccgggcaccccgatgatgacgccgccgcgctacaagacggcggcggctacttatctgggcgtgtgcctggtcatctttcttctgaacattaccgtgggagggcccatccgcgcccttttgcccgcatggctctcctttttcctgttcaacgcctgtgtggtggcgctgctgacctgggtattcatgccgctgatcagcagcattctgtctccctggcttttcagggcgcaggccggaaccattccgggaacaaccccgaaccatgatgaaaacaatgaaaaacaatgataaggtttacgccgatttgatgatctcaaacggcaacatagcaacgctggatgaacgcggaacgatggcccgcgccgtcgccgtcaaggatggaaagatactggccgtggggtccgacgaggacgttgcccagtacaaggggccggatacccaggtgatcgacgccgggaaaaggaccgtcattcccggcctgaacgattcccacttgcacgtgatccgcggcggcctgaattacaatatggaactgcgctgggacggcgtgccctccctggcggacgccatgcgcatgctcaaggagcaggcccgcagaacgccgccgggacagtgggtgcgcgtggtgggcggctggagcgagttccagtttgccgaacgccggatgcctacgctggaggagattaatgaggcggcgccggatacgcccgtttttgtgcttcacctgtactgccgcgccatgctcaacaaggccgccctgcgcgcctgcgggtatacgaaggatacgcccaaccctccgggcggggaaatccagcacgacagcgagggcaatcccaccggcctgctgattgcgcggccaaatgccaccattctttacgccacgctggccaaggggcccaaactgcccctggaacaccagatcaattccacccggcatttcatgaaagaacttaaccgcctgggcctgaccagcatcattgacgcaggaggcggctatcagaattacccggaggactaccaggtgattgaagagctgcacaagcgcggggaaatgaccgtgcggattgcctacaatctgtttacccaaaggcccaaggaagagaaggaggactttgccaaatggatcaggatgaccaggccgggagagggggacgattattaccgctgcaacggagcgggtgaaatgctcgtcttttccgccgcggactttgaggactttctggagccgcgtccggacctccccggagacatggaatccgaactcaagggggtggtcagcctgctggccgccaacaaatggcctttccggctgcacgccacgtacaatgagagcatctcccgctttctggacgtgtatgaagaagtgaaccgggagattccctttgacggcctgcactggttcttcgaccactgcgagaccattgacgagaagaatctggaacgcgtcaaggcgctgggcggaggcattgccgtgcagtgccgcatggcctaccagggggaatatttcatggaccgctacggcaaggaggcggcggaacatacgccgcccgtgcgcagaatgctggaaatgggcattcccgtaggggccggaacggatgccacgcgcgtggcgagctacaatccatgggtttccctgtactggctgaccaccgggaagaccgtgggcggagaaccgatgtaccgggaggaagactgcctttcccgtgaggaagccctccggctttatacgcaggggagcacctggttttcctccgagacgggcaaaaaaggagcgattgttcccggtcaactggcggacatggtcgtgctgagcgaagattatttctccgttccggaagaggagatcaagggaatagaatccgtgctgaccgtcatggacggcaaaatcgtttatgccgcgggaccgttcaaggatttggacccggcgcccattccggtgctgcccgagtggtcccccattgccgtgttcggcggatacggcgctcccctggacccgaagaaggcggccagggccggcgtgcctttccagcaggagcaccggcattcctcacactgccatgaacacggctgcatgcattccgcgttcatgctgatggagggcgcggcgaatgcgtcgcggcccaggtattccgatttctggggctccgggtgtggttgcttcgcattctgacggtaaatgatgcgaagcttcctgcgccccgtctccctggtgggacggggcgctttttcctttcccggaaggggtagggaataaggctgcggtttttcctgccggagttacagcacttcccggtacagggaaatttcaatggcttcctccgtcatgtcgctcaggagtgggatgatgcgctggaagtgctcggaatccgcatgaacgtccacggctgcctggtccttccactcttcaatgaatgtcaggatattagggtcatcaatgtcctcatacaggtggtaggaaacgttgccggcttccgcacggctgttttccaccagttcccgggcggtggcgatgaattcttccctggctcctgctttgacgatgcttttggctgtaatcttaatcatggctatggctgttttggccgtatccagagtaagggagcgggagagcccgtgtcaacgacccttttgaggcgttccggtcatggctgcgtatccttcaggattttcagaacataggcgcgcgttgtatccgtatgctccgcgccgcgtatgcaggaaagcccctggtagagtcccaccgtttccaggcgcaggtccatatcctgtccatccagatcctcccgggtgggtgggggataattggaggcgggaccgctcagggacttcatccgcatggtatccatgttgaacaggcagctttgcatgccattggtgaatatcaagctgccctggcgttgtttttcctccggccgcagcctgtaaatggtgatggcgctttccccgccgggattgatcaggatggcggggaaaacatgcttgttcccgcctttctcccggacggtcaggtcaaagtcgcattctccgaaaaacctgttggtgacacgggaggagatatggacctccacgggcacttcctgcggcaggggaacaagggtggcagcagacagcgcggaccccggcgggagttccggaaccgggaagggtacggtgatgatgtcaataacgcaactgatgacgccgatcagcacgaacagcaggatgcccttgttccggagctggacgggaagcaacttccgggattcccccggataaagcttgctggcggatttgtcctgctgcaggcagtattcggtcaggcgtgaaatgacggccagggcgcaggccatggctgccagccatgcaagcgtgaaggccaggtcctccaccatgggacccgtggtgaaaaagctgaataaccagatgatgaaggccgtcagcaggagaaagacgaccaggaaggccatgcagccgaagggcgccgtggagacgggaatccagcgcctgccgcgcttgccgcaggcgcgcagaatgaggatggcaataaaaaaagcaacaattgccagcgtagaataaaaatgttgaaacaggtaatcgagcatggcatgcggggaaaacttggatagtagctggtcggggaccgatttcatgccagtttccgaaaaaatatccggaaacaagccgtttttacatgatgaaatgataggcgtcgaattttggagctctttatcattttagccttttttcacccttgcttgcaagatttttcatttccttgtttcccgctatttgaatttaatatgccggaaaagaattattctacaattgaatatggaggaaaagccggttccatcatcttccagagaggaaacagggcgcagggctagcggaagaaaagggtgttgcggaattgcgggttacaaaacaacgggaaacggcacaaaggagtttcccatccccgtgaagccgaaaagtgattcatatccccgtcccggagttctgtaccgtctccgttccggctcctccttgggggggacggattgccaggggagccttttcttcgggtccagctcacttttattgaaagataaatgataacgggaagaaaagttttaaacttgttggcaatgagtgttttttatcttgatgtggagttttggcgcaggtgatttctgaaccaaaagtttatcttgttgttccgttttattccctgggggaaaggtgattgagggccggattatattcaaaagaaaaggaagctgactttatgagggcacttgcagaaatatcgggaaaaatgttcctctgtcgcgctaatataagaccggaaaatgaataaaatggaatttaaaactttatttcaaacatttctaagaaagtgcaaataaattcgttaaagatgataggggaaagtttatctggggattaaacgggaagccggttttttccataattatccgggcgcggagaagaaattgaatggagaaaataaagttcatggatgaggaaacaggccgattcctttcccgaatttatttttctcttccggatgatgaagggaactatcgttcctgttattacggtgttctttttaagccggcacggaaggcctcttggactggagaaaaagcagtcatgggttgcatccgccttctcttttttcatgttcttccgcccctgccgtgccattcagcctgtttcctgccgggatttttctttttcaagaagttgtacataccttatggaaacagcgtgaatgccgcagttgcggtcaattatgcaatctccttcccgcgtatttgccttgagccggaaaaggggttgggctagtggctggccgagtgttttacctggccgggagaagttccgggtaggctgaattcctctctgttatggaaaatggagaaaaaggtgctgccagaaaaaagctatccctgtaccgggtccgccagcacttttttgagcttcgcaaagcggggcagggagcattccttctgcatggccgtttctccctggatgaggggcagaacgtagtcgatgaacggctgttcaactccattgccgcgggtattgatccattcacgggggacgagtttttccacgttggccacgtctcccaggctggtcaatttggtcttgcaggagtagatgccgttttccgtgctccgttcgaaggcgaccatcttgtccgtctggccggaaacggccgcttccacggcggctttccccgccatgtaggcttcatcaatgtccgttttggaggccacgtgggaggcgcagcgctggaggagggaaagttcaatgctcctgaccttggccccggtctgccgcttgacggattccgccagcatggcgcccagtccgcccagctgcgtatggccgaagacgtccctgtccccggattccgcgacaaagcggccgtccgcatattgcaccccttccgagacggcgaccatgcagctcccgttacgcttgtaaatccggtccacatcctgccagaattcttccatgcggaaggggacttccggcaggtaaaccaggtccggtccggcgcccgcataagtggccagggcggcggaaccggccagccatccggcgtgacggcccatgatttccacgatggtgacacgccctttgtcgtacacgcggagatcctggtgcacctccatgcaggaggtggcgatgaatttggcggcggaaccgaagccggggcagtggtccgtgccgtaaaggtcgttgtcaatggtcttggggattccgatcacgcggcattcatagccggattgctgcatgaatttggatatcttgttgcaggtatccatggaatcattgccgccgttgtagaaaaagtaacgtacatcgtacttccggaacacctccagcaggcggcggtagtccgtatcatccacggcgggatccgccatccggtagcggcaggagcccagggcagaggccggggtgtatttcagcaattccagttcctccgggtcttcctgcgccatatcgaacaggcgttccttcagcactccttcaatcccgttggcggctcccagcacgcgggtgaccggttcgcattgcagggccgtctggatggcccccagcgcgctggcattgatgacggcggtggggccgccggactggccgatgatgcatgctcctttcaatggcttcatgggggaaatggtggatgggagagttctgtggagccccgttccgcagcgtgggggccgggggatgaaatcagagtcgaacctatctggagcccggagggatgtcaaacattattggtctgccggagggactcccgcagcccgggcggaagagagggaaacgccgggcatccgctattcggttttcatgcttttccgggatggcggccaggtgttctcccaaggcgggcgccgccggtggtccggtgggttttgtgtgcggaagaggcatgcggaaatccgtgctgtacagcctggggcttattaccagggcacagatggcgtttacgcgcctttttatgcccatggcgtcccttgtttcttccgggaaagcgtatttatgcggacggcggcgtgtggcgcacggagacggactgcccggggtagatttccgggatgacggagatgctcttgatgtttttgcccgcagtcagggcacggagcatccggatgagcttgtgaaccgtttttgtctggttctcctcgtaataagtgatggtgggcagcaggcgctccatgaagggttcatacgtcaggctgatcaggctgagctggtccggaatgcttaaagagcgggcttccacccaggaaaggaggggaacgatctggttgccccgcgtagctaccagggcggacatgtccggatgttccttgaacgctttggcgaggtattcaaagaaaaggggcgtctcaaacggggtgggaatcagcacggggttccagcccttttccgcaaagctgaaaaagcccttctgcattaactggtggcccttcaacgggtccggggggaggcacaggccgacggtccggtgccccttgttccagaggtgctgcgccgcatggtgcgtggtggccgcccaatggcggtccagatagggcaggttgctgctctggtaggaagtgccgcgcacgatgcagggaatgccgtgtgtcttgaaccagagctgggtctgttccgaggagcggtggagtatccagcagacgcattcggatttggtcaccagcttggcgagacgcttgtccgggttgttgcctaaaatccagggagcttcaaaaatgcggacgctgatgccgtcttcctccagaatcttggagatggtgtacacctccgccagcacgctttgcgccagcctcttgaggggctggggcgtcagaaagccgataatgccccttttttcctgaacaggatgggaggggatggtttttcccgctccttcctccgtagttttcaggatgcgccgcggaaccttgatgcgcgcgggagcgatccatgcctccctctccagaagagccagagcctttctgacggtttcccttcctacggacaatctgtgcccgagctcccgttcgccgggcaggatgttgaccaggctgccgctgaggatcatctgtttgattttattggctacggtttcaaccaatgaagatgcgggcaacgaagtcatactcttttatatacgtactgccttgcgtgaattcgagtcaattgtagggattggttccgcagccaaattcagcgtgaatgtccttgttgcggtaagttgttggaattctgtaatctagataaaaatatgagtccctggtcttttttaatgtcggaaagtggagaaatcatgggtaaaggatatattattatcaatggattacatgtttcccgcgttcgcaggtgagtggtttgtgattattttataaaatattcataataaacatcttggtttatcttttctgtcaagcggtgtcattttttcatgtcggttggctccgcatgcggcgtgccttcctccggggaagtggcaggaggcatgcacgtatcagcatggatgattcctgtctcttttccggtgctaaatctgctcaatgaaagtgaataccataccgggcgcggcttatgcgctgacatgtacggcagcatgctctgtccaggctcttctctccgatgcttcttgcctgactgttctggaaacggaaaactccggacagtatatctttgtggcccctacggatgcggtggaggtgtccgacgaacatgcactggtaacacagacttttaaagtagccgctctgggattggctgcccagggcggcattcggctgggagaagatgccgttttgaaaaatctgacggcggaggcgtccaccttttccggaaccgtcaatgccaacggcggtatcaatgccgtatccgcgcttgcggccggagcctccacaaccggcctcaacgcgggcagccacgccgtcatgtccgttctgaggaatgtgtaccatctggaccacgcgaacggaaccgttaccaccctggagggaagcaacgtcaagatggagcgttccttggcggactggtgcgggctgtcctgggcgggcacgctgacggcgcacaaatgcgtcctggtcaagtctgccgtcaccaataccaattacggaggagccatcagccctgccggaaccggcagctatgcgctggtgatgtctctgctttccggtgtgaatttggccgcgactcaaactaaattcggctggaccgggtattccggaaccgtcaccgccacaacggtggagaatattcccggaccgcttttttatgtggatgcagccagcagaaaagtagtggccaggtccggagacggacaggttgtaacggagctttcctgggctgccttgagcctggactgggtatcccggcttgatttgattgcggttccctcttcatccggtacctgcagtatttatctggcccggcatacggggataagctccgggcacgggaaccactacaatttcaaccgccgtcatcttaatccacaagcttattacctgggggaagtttctctggggctcgtcagcaatgacgtccactacgctattatagatacttgctccgcagagatggccatgttcagggtaagcgtcatccaagggattaatccggctgactatcttaaaatagaaacaatttaacatgaaagaattacaattttatttcccgcgacccggcaagtgggatgaattcacgttgactgccgttttcccggatatggcggggtttgttcagaatcagcgctacaggcaccgggagctgacgccggaacagttgcaggctttttccgaagtagtgtccgcccttaccgttctgtctgacgaatggaaggccgttcaggcatgggcgaggctggatatgtgcatgaccggcacatccacggagggtagcgaagacatggtcaaaacagtggaagcggttaccctgaccgtggaagctgtcaatggccggggagcccgtaaactgttcaccaacgcaaattatccagaatttacaattccggaagcgggggcggtggcatttttcaaacattttacggatagccgtcaatagcaggcagcccatccgttatcgttcaaggggggatgcccaaaggcgggagctttccgttttacgccaataggcatggatgctccgaatggagcaggcgtcgctgcatgcagctcattttttaaccgcacaacgagagattcagcacgtccggattcgccatattcgtcaggagcatggaccatctctttttcttattcattgcaattccctatacaattatgaatattccaattaaacgattattcgtcaacgtgttccataacatctgcgaaggctccggaacggagcttctccaccagatctgcgtctggcgcaagatgggactggaagtgccacacgtttcttccagggattgcctgggcactcttaacgaattttgtgaaatcataccgcatgcctgaatccatttccattcttcctgctctcattaaactgggtggatttcaatattgcgccaaccatggcaacataggagatttgcttattgacatcgccacgcggcagtttttccgtcgccatcatctgccggcgcaggaaaaacctcatcggcatgtggtgtatggcggtggcggaaggttcgtgtccttttacggttctctggatgagcagaaagaggaactgacggcccgctcagtggaacggtgcattatccttccgcacagcttttatcaggtagattctcttattcgttcctttgatgaaaggcacctggtcttttgccgggaacagcgttccctggattattgcctttcgctcaatgatcgggcgcaatttctcccggcggacgacatggctctttacttctgccctaattccttgccgtcttttatcctggaagaaaagggaactcccgcttgtccggaaccatgggcggtttccctcctggaaaaaatccgggaatccgtgcaggaatcttctttctgcgcattccgcgaaaattactggcagcagggggcttttctgccgcgccggggcaaggagagcgctctgcctgcggaattgatcctgggacgtgatatttccgatctttggaatggctggggtgacggttctgccgagcaggcttttctaatagggggccttctctctattctgaaggaattggacatcgtcatttcagaccgcctgcacatctgcattgcaggtctgcttgccggatgccgggtatacttcctggacaacaactacggaaaactttccggagtttatcgtcaatccctgtccgatcatccaagagcgaatctccttcctcactctgaactttccgtactttttcccgagatattttcccttgtccgcgaatagtctgtttccgtccataagctcctctccagggaaaaggcatgggcaggagatgtgattcaacctatgcagtggagtagcgaatattgtgatgaggaacttactctcgtctattacaattatcgtcattacaattcagctgacggcaggtggatcaatagagatcctattgctgaaaagatagggaataatgtttatagaatgattctcaataatccggtcaagcttgttgatttacttggtttaatagaaagaggtccatttgatggaaaacatcctactgtcaaatcgtgttcctttggagagtgttgtcaagagaatataaaaagatttttccaatggttcacggcatccaaaacacgtcgtgaaagagattttacagattattggagaaagtatggtacaaaagaatcatgggataatcatcgtacggaatttttgaaagctaggttaaatgcagtgaactgcactaagattatttctataaaataattaattcattacgatacatcctgaattggaagtagtacgtgaatggatagacgaagtggcgttgcttactggtcctggaccatttcaagttctaatttcggattctgggcctgtgcaagaaccggttggcagtggatgggatgcattttgggaaggtgcattagcaggagcgctagctgctttcattggtggacaattggggcctcaaattgcattaccggaggaaatcggtactgtcccaattggtgctattgtaggaggagttatggctttataataaaaagaattaattaatggcaaagattgaaaaaaacatgattgaagctctccttgcacggccaacaagcaagcaggtactggcctttgaaggagtctttttggaagatttaaatgattatgtgaaatgggcaattgattctttacataattccctgggcgaagaaatggacgaagccctgcttttgttgagttcgcattttggagagctttcaattaattattttgagttgcaggacgatctccgagcatttgcctcagccgccagaataattcctccaaaaggcaaggatgccgttaggctttattgtcttggatgtcttcaagatgttgtctgtggtttgaaaggaggagtagaatctgaaaaagacatgcttcagcatttatcagatttacttggaaactatacaggggtggatgaatttggattgattccggaaatggaataccattggtggcatcttcaacaaggagaatcccatgacgatattgtaggagatttttgcagggaagcagaaagactagttcatttgttgcatgtaaaattacatcgcgagggcgaatattggaaaattacagtagaataatttttaatataaagtatgtaattactgatgattttatttatagatatagtgttccggaaaaagtttcagaaattatatctatataaacacacgagtgtttcttctggaaattattgctttcagttttctgcttcttaaccgagagctgttaactgataaaagaaaaccctgaaaggattaagctttcagggtttatttattggtaccgccggtgggactcgaacccacactcttttggaactcgattttgagtcgagcgcgtctaccattccgccacgacggcacgtgaagtggaagaattaagcggcaagagggctgtggagtcaagaatttcctgtggaatgtgggaagcctgccgaaaaaacggagggaatccacagtggattccctccggaatgtttccgaatgggaagaacgtttagaacgagtagcgcacggtagcgttaacgctctggttggtcatgtgttccctctgttccagatggtagaaggctccggcgctccaggcgctggaaatgacccagttcagccccgcatggacgatcagggcgtggcgtcccggatggacgccgtctacccggaagggcgtgccgaaggcgtccgttttcacggaagcgttgcggcgggagacgtctccggcgtaggcaaccgtcatctgcggcagcaggtactggcccctgccgacggcgatctgcttctgccaggtgacgccggcggggatgctccagttctgcacggagccgtcctggtaccaggcggtgccggaaccggaacgctccccgaaggaaccctgggagccgtgcaggaattcaatgcctgcgaagggtttcagcacatccgtgctgctcaggcggatgttccaggttcccttcaggccgaagccgtacacgtcatcgttccaggaggcggtggcgggtctgccgcccagcgtgccgtccgcatcgttgtccatgcggccgtaggtgaagtagccgtcaatgtccacgctgtttccacggagcaggtcgcggtggtaacgctggtagagggccagcatcaggccgtcctggtctgccttgaactgcttgtccgcggagtggaaggaaccgaaggtctggccgaaggccgcgccggatatccagtttttcgtccaggcgtagtccatgcccacggcatagccgccgcccttgtagtcaaagccggaggctcccgtggcggaggagacgttcatgaagtcccccagcccggagaaccagatgttgcgcgctcccggtccgcggaaatccagttgggaagccgccgtatgggcgaagctgtccaccacccggacggaggaccacagcgtgttggcgatgcgggaggcttcctctccgcgcagggccttcacggcgttgatgttgaccttgccgctgaaaatcaggtgcaggccgtcgtcggaaaccgtgaagccggtatccgtgaccaggtccgtgcggcccttcagcgtggggtcgatgccggtgaggtcccacagggatccgtccggatcaatgaccgtatcggggtccaggttgaccagggagagggagaagctttgttccttgctgaaaagcaggttgtctccaatgaccacattgacgtgcgctccatccacatggtaggaggaagagacgttcatttgggaataggtgtccgctccggtatgggcggcgtccgccgccgccgttccgttcacgatgaacgtgagttcctgcactcccccccacgcgttcaggccgccttcatagttgtggtagcctgcggaggagccggagccgatcacgatttcactgccgtaataggtaacctctcccttgaaggcgccggaaccggagacggtagaaccgctgttggtttccacgccggatagaacggtggagccgttcagcaccagatgccccggattagccggatgggcgaatgcctcacccaggcggatgctcccgccttccacgcccagactggcgtcccagccgtccagaacgagggtggcgttgttgctgatgacgacgttttccgccgcataggaacccctggcgacaaccttcacatcctgtgccgtgacgttgaggttcgcgaaggcgcctccgtcggcggcggaggcgctgtagcctgccgtgccggagtgttcccagttcagggtctgttccttttcatccttgcccgccagcgtcagttgtccggaaacgccgctgacggctccggaggaaatgacggcgtccgactggctcaagtcagcctccccgccttccagcacgatgccgtgctcaggcaggttttccccgatgatgaccttggagccttcccccacatggatgctttctccggggttgacgacgatgggggcgccttcacccaggaatacctggccctggaggcggtagctcatgcggtagttttccagttggaagttgtccaccctggctccgtacatggcggtgatgccgttcttgatctggtccagcgtgacgacccaggcggaatccgtggcgttgagcaccgtggcgcctaccgtggcgttttgcgccaggtccagagttacgttcaggccgtcaaagcccacttccagggccgttcccgccgcattctgcaccagggtcccgttgagcagcgtcatgccttccgcaatggtgagcgtgccgctgccggagatggagccctggttgttgacgacggccccgtcacggagtatctgggagttcccggtcaaggtgacggcagagccgtggcccacgttgacccggttgaacaggccggcagttttttccgtggagatggtccagttcgcttcgttgtccgcactgcccacgttgagcgtgacggaggaatggtgggtggccgtatcggacttgctggtgttgacggttgtcctcaccgtatagtcaaacagtcccggagcggcgtccgttccggacagcagcgtaatggtatccacggagccttccgctccggagccgcccagttcccagatgccgctgatggaagctccggcgtggacggtgacgttgtccgccgtgttttccgtggagaagccggaacccgtattggacccgctgtacagggcataccccgttgcttcgtcccccgtcgccgttgcttcaatgacgccggtggaaccgatggtcgtcgtgatgccggctcctcccatcagggccgccgccgtgctgccggcagttgccgctctgacggttccgttgatagtgccggtggtcagggagaattccgccagcagcccgtaggcttccgcagctcccgtggaggaggcggagatgaaaccgctgatgtttcccacggacagggagcccgtggaacgtgccccggcggccgttccggccatggcttccgcccggatggagccgcccacattgccgatggtaatattggaatgggtctggtaacccccttcttctccggcgaagaggccgtaggcgtccatgccgttggtcgtggcggtaacgcttcccgttgctcccatgtcgcccagcgtgatgttttccctggcttcaatgccgatggcggaaaagtcctcgctttcatcattggagccggaggctgcggtgatttgaccgtccagccgggtaatgttcacctgcccgtagttggactggatgcctctggctccgtagccgccggccgtcgccgcggaaatgctgccggtggaggaaaaggtgccgatgttgacgtccttgtagcgcgggccctggtagtccatggtatttccgtaggcatacagtcccctcgcatagtttcctgttcccaggtccacggagattttgccggccatcgttccaatgtccaggcgcccctgataggcgtaaatgccattggaggagaaattggccgtgatggagatgagggcgtcttccgtgatcgttccgatggagagtattttcccgtagctccggatgccggtggcattcgttctggctgcggagatgttgaatgttcctgctagggtgccgatgtccacattgactccggaggaggtgtcaatgccgaaggcgttgtttgccgtggaggagacgttgaatacggcatccccggcaatcgcgccaatgctgagggtgcctgattttccccagattccgcgcacgttgctggagcctgtcacgttgaatgtggcggagaccgttcccagggccgcatctgaggcggttctggctacagtggcgtcataagcgccggccaggtcttccctggcagtatcctgggcatggaccgttcccagcatgccgaggcaggccagggtcatagccacagcctgcatccggtgcctggcgtggcacggtgttttttcaggagtgttgaacattccggacttcaaggaggccggaccatcatagtctgctccgttcaagcggagcgtgttggatgaatgcatgtgtatggtctgaatgccggaatactcgccggcggttcataaaatacttcggggctggcgatctggctcattgcaggtttttaagccgtgcaatatacagtggcggtaccgctccggattcacaccggattccccatctatttcctgcccgtaccacgggcttcccggaagcgcctccggttggtgagggaggcatggcatgcctaacatatcctccggaccctgtcaattggaactttttcttgcgtttggctccctgtttcgtattgccatgaaggacggccatgctatcatggcgccccggatgttcgttattgtatttggcatatgtatgaagcgttaacgaactctccttcacatgcgccgggcatcgtccggggaaggaaactgacggagaagtgccgtgacccgtgggtagatattatccgtgtgctggccatgttgcttatcatgatccagcatactcccgcttctcatggcttcactgtgtatgcaacacgtgcgggcgtatttttctttttcatggcggcgggttacttcctggcccggaagtatgggggcagcccggccccggtgccctggcttaactggagaaaagcgtttctgattctgtgtgcctatttgttttggattttcgtttccatggccttgttcgggtttcccgcggacattgtaaaatggatgatcggtctgggaatagggcgccctcctttgggaactgttttatggtttttgcgggatttaatggtgtttgtgctggtttcaggagcgttattccggatgccgcgggcctgtctgctcattctgtccatggcctccctggtgcttttcagtacgagcaattccctttacttgtccttcgaatacatggacaaggttttctgcgttatccatcccaggggttttggagcatttgcccttggcatgtttttgtgccgttattcccttgaagagttgaagaatgcagtcggtaaagcgtggctgtacgtgctgatggtgtttcccgttatttttatatgggaaatgtacagcaccgttcaggagtctgcgttatccttgtgcatgggcgtgctgtggctggcatcctgcgccttcttgatgatgcggtattttccgggaatctcctctttctgcgcccgtttggctccctccgtcttttttgtatatgccgcgcatgccctggtttatgagggcatgctcaggctcggttttccaaggggaagcttctggatatggggaatggccgtaccccttgtttttctggctctgagcggactgtactttttactggcgcggatgtgtccggcagtgttgaagtatattgcgctgaagaattgaccgtctgctatttttttacggttacgggaagccccgcaaccatgaagtaaacttcgtccgcgcttttggctagaagctggttggcgatgccaagcccgtcgcagtagtggcgcgtttccgcgtccgcctggctgatgcccatgccggtttcagaggagaccagaacccagggcacgggggattgggggataagttccttcaaggcctctatttcctcaatcagcgcttcctggaatggttcgtagtccgtagggtccttctgggcgtacagggtattggaggtgagcagggttacgcattccagaatgacgccgtccacctgatccagcaggccggattcccggacggcggcggccacatggcgggggcattccagcgtaagccagcttgccgggcgccgttcccggtgcttgcgcacgcggtattccatggatccggctccgggccacacctccgccgtggcgacgtacaggatttttttcccgaatccggcggctatctgttcggcgtattggcttttgccgcttctgatgccgcccaggacgagcgtcatgcgtgcgggattggcgtcagtgtttggagatgtagcgttcatgggattccagcatggcctggtgggagttcagaaagtcgtccaggctgaagacttccagagtgatgaggggggagaaacggatgtcccacatggggtggaggatggcgtccagcgtggcggcggccatgtggtgcagggatttgtggtcccgtttttccagcccgtgcaggtggcacatgcgtatgtccggcagccagagcggcagcagttcttccggccgcaggccttccttccagacatggcctatgtcaaagcagcgggaatggggcgtggcggagaccagcttgtccaggtagtcggtcgggtggcgttccaggttttccagggccaggcattccggagcgggcagatggggcgtgatttgctccaggctgcggaggatgcgttccgtttcacgctccgtaagatgggggcgcatgtccgggccgggaatgtggtccgtaaccacgtgcatgacccacgtgtggggctccagttcccgggtcaggtcaatggcgcggatgatgttttccgtgtagcggcgccctgattcctccgtggcgaagccgccgtccgtgggcaggtggacgttccacttgaccccggcgtccgcggcgattccggccagctcccggatttccgccggggtaatgagtccctccccgtgctctccggcttccagcaggagcagggcgatgtcatccgcgtaatggacgcattccctgatggcggggacgtagtagtccgggatgatgaaggaggtgcagccgatgttgaggcccggaacgcggcatttgtgcggagttttcataaggtgcagaaggtgagcaggacgagccattccgtgcattccacggtgcagccgaacacgtccccggtgacgcctcccaggcggcggcgggcatacaggagcagggccgtggaaccggccagggccgtgagcagggcgtacagcccgtgccatcctgccagcgcgcaggcagccagggtgacggcggcggctatcaggtcgtggacggggcgcgtcccttgcttgaaggcttcccccatgccgccggggcgcgcgcccggaaagcgcatggcgatgaagatctggctgcgggccagcagcccggccagcgcgcacgccgtgagcagcagctcccatgaaccgcaggccgccagcgccgccagcgcggcgcccttgaaggccaggttaaagaacagggccgtgccgccgaaggtgcccaggcgggagtctttcatgatttccagcctgcgttccctcggcacttccacgggcagtccgtccccgcagtccgccactccgtccagatgcaggccgcccgtgatggctacccagcaggcgcagccgatgacgccgcagaccagcgaggggaagagcagggtggccgcccaggtcaggccgcctgccagccctcccacgacgagaccgaccagcgggagccatgcggagatgccgttcaggtcgttttgcagcggccacgggcctacgggcagccgggtcaggaagccgaaggcggagcggatggtggtaatgacggccatggcgcagggaaaggaggagttagcgcggaacggtgatgtccagttccggcagggttttcatttcagacagcacgcgcgtggcggcgtccagcagaggaaagaacagggccgcccccgtgccttcccccaggcagaggcccaggtccatgtacatggtgacgccgatgtggtccatgatgagcttgtgccccggttccgcggagttgtgggaaccgatgaagtactgagccgcttccgggcgtatgccctgggcgatggctgccgccgccccggcaatgaagccgtcaatgacgatggggacgcgcagggaggccgcgcccagcatcagtccggccatggcccctatttccggtcctcctaccttcgccagcacgtcgatggcgtcggaagggtcggggttgttcagggcgattccctgttcgatgagctctatttttttacggatgacttcccccttgacgccggagccgcgccccgtcacggtttccaccggggttcccgtgagcacggccacgatggcggaagagggcgtggtattgccgatgcccatttctccggctgccacgatgtccagccccctggctttttcctcccgggccatgtcgattcccacttgcaggcattccagcgcctgttcccttgtcatggccgggcccctgctgaaatcgttggctccgtgcataacttttcttttcaccagccccggcaggtcgccgaagtcgtaattcacgcccacgtccaccacggagaggcgggctcccgcgttgcgcgtgaaggcgttgatggtgccgccgccttgaaggaaattgcgggtctggatgtaagtgacgtccgtggacgtcaggctgaggccgtggtcggcaatgtggtggtccgcggcgaagaggaccacggctttgtccttcaggcgcggcgcgggattgccggtcatggcggcaatctggatggctacgggttccagcttccccagcgcgagggggggcttggccagtattttctgatgttccagggcggttttggcggcctgttcgtccagcgggggaatatgcagtttgttcatgatggtcagaagcggggaatgaagaaaaggatgagggagaagaccagcgtgcccgcggcggcggtcatccacatgaggcgtatggccagggccaggtcactgacggcggcttccgtgcgcccggttcctatccacggatagtccgcaggaatccccttgtaggagaccggaccgccgatgcggaggcccagcgcgcccgcgaaggccgcctcgctccaggcggagtttgggctggcatgggcgcggcggaaggcccagcccgtagtgagcgccctccgggcggaggttcccttcacgaagagggccgccagggaaatgcacggcaggatgaggcgcgcggggataaagttgagcgcatcgtccgtgcgggcggcaaaggtgccgaagcgtctgtaccggtcgttctttttcccccacatggcatccagaatattgaaaacgcggtgcgtcagcgcggcgaaggccgcgccgaaaggacctcctgccaaacagcctgctgtagcccagaacaaggtggaaaagacgccgtccgtcagattttccgccacgctttcaatagccgccctggccatgccgtgacggtccagccgttccgtgtccctccctacgatcatggaaacggcgtgccgcgcctcgccgtccttcccgctgcgcagggcgttcgccacccgcagcgcatgttccgccaggccgcgcggggccatgcagatgtaaatgaccagaacggccggaatccagggaatccacggggaggggaagacggaaaagggaaggcagaataccgcgcaggcaagccatgcggcggcgcaggttcctaaagccgccgccgttcccgccgtaaaagtccctccccacagccgccgtgccagggtttccgcgcggcgcgcgcaccagccgatcaggcagacgggatggaacctgttgggcggatcccccgccagaatatccagcagaagggccgcaggcaggatgaacgggcacggaagcatgggtcagcgtttcagttgaagaatacggtagatggccttgaggtccagatgctcccggactacgtccgccaggcggtccagcgcgccgtccaggtcataggaggcgtgcagggatggattgggggacaaaccggaatccactctgaccatgttgatgaacgcgcggcggaactcgtcgccgtccagcatgccgtgcaggtacgtggcccagattcggcctttgccgtagccgcagggggagccgtcttcccggaacatgatggggacgctcgctccctcatggcgggtgacgccgtggtggatttcatagcccgccgcgggaggggccagcggcgtgcttgcccggcgcacgttgagcagggttttggcggcggcgaaagtggtggaaagctccagcaggccaagccccggcgtccgttcctccgcggattccatgtgcagcgggtccagaatgtccgttcccagcatttgcaggccgccgcagacgcccagcatccactttccctgttcagcgtgccggcggatgggttcttccagccctgcggcgcgcagtccggccaggtccgccgccacgctcttggtgccgggcaggatgaccaggtccgggttcccccattcctcccgtgtccgcacctggcggaggcgaacgtccggctccgccgccagcggggcgaagtccgtgaagttggagacgtgggcgggcatcactacggccacgtccaggcagtccgcgtgcctggcttgctcgtcctgttcaaagggcagagcggcccggtcctcttccggaatgctgatgttccgtatcatcgggatgacgcccagcacgggcctgcccgtacggtccagcatgtagctgtgcgccggggccagcagctccgggtctccgcggaacttgttgaccacaaagcccgccagcagctctttttcccagggggcgaacgtcatccacgtccccaggaaggaggcgtacacgccgccccggtcaatgtccccggtgagcagaactttggcgcgcgcatagcgggccatgttcatgttcaccacgtctgcggatttcaggttgatttctccggggcttccggccccttccaggcagaggacgtcatactcgtccgccagggaatcgtacgcccggcgcacgtccggccagaagcgccttttggccgtaaaatattcccgcgcctccatgtggcctacggcacgccccatcacgatcacctgggagccggtgttggaatggggcttgagcaggatgggattcatcctggcatccgggtcgatgcggcaggcctgggcctgcaccatctgggcgcggcccatttcctcccccagcgcggttacgccggagttgagggccatgttctgcgccttgaacggggccacccggtggccgtcctgaagaaaaatgcggcacagggccgccgtgagcacgctttttccagcatcggagcaggtgccctgaatcatcagggccggtttgggcagtttgcggagaatggcggggccgcctcccttcagctcggcccgcagggcctctgccagcagggcgtgttcttccggcgtgcggacgcctgcacggaaccagccgccgttttccagccccggataattggagcagtcgcgcagcgcgatgccgtggtttttcaggagccgggcggccaggccggaaggcgcccccgccagacggaagagcaggaagttggccccggacggcagcacggcggcgcccggcagggcagaaagcctgcggaacaggtcttcccggcgttcccggttcagggcgcgttccccgtccgcccatgaaggcggctgttccagcacggcccgcgccgcagtcgctgcaaaggcgttcacgttccacgcgggcagggactgcctcagccgttccgccagtggagcggcgcagacggaaaagccgcaccggacgccggcgatgccgtaaaatttggtcagggaacgcaggacaaccaggttgggcagaagggccgcgtcacggagaagcgattccgttccgtccgcgtagtcaatgaaggattcgtcaataatccagacgactccggggcggttccgcacggcctgccgcagggccggaacgtccagcagcccgccggatggattgcagggattagccaggaaaacggcgcttccgtctgcggcctgttccgccggcaggagggaagacggaatgaaggaatcccgttcctccgtccggatggaaagaacgtccgtgccgtggcgcaggcaggccagcctgtattcggaaaaagcgggttccggaatgacggcccgtttcagttccagcgcgcgcgggagggcgtgaatcagttcgttggctccgttgccgaaggtgaagcaaccggaaggcagcccgtaatgaaccgccgccagttcccgcagctccgccatgtccggggaggggtagggaacggctgcatccatggccttccacagcgcggaggcaatgaactccggcattccctccggcctcaggttgacgctgaaatccagaatctcccgttcgggccgtccggcgtccgccgccagggattttaaatcccctccgtgtgaaaaactgttcatgccgtagtaattaagaccggcgttccaggatggcgcctgttccggaaaaaggaaggaaacgccttgaagaaacggtttttccggaagttgggaactcctctgaaaacggaaatccttccccgctgcgggaaggagggtgaaaggcgtgtcatgggcgcatcatgtcctgtacgcgccgggggtgacaagacaaaaatggagaactccggttggaaaaacgggatggcgcgcggcggctgaaaagaggaagcgtccataaagcggcggaatgttcaaagaaaaatttttttggcttgtcataccggtctctttggtatttcatccgtctcatgaaccctcatgggaagggttacagacctcagggacgcccgtagccgggcaggaaatagattggggaataccggtgtgaatccggagcggtaccgccactgtaagcgagcctgtctcgcaagccagaagaccagcctgtggggttgtccaactgttcggcgagttaccgaacgtaaggcaccacaaccatgctttatacgaagaaagcccttcagatgggcgctattgccgttggccttgccgcattcgcaggccagtcctctcttgccgagtctgctaaaaaagaagactccaagccctccgccagttcggaaaccatgcaggtcatgccggaattgaccatggcgtcccactttacgggcgtgccgtacaaccggtccggggtatccgtttccatcatcaatccggaagaattccagaaagcgggcattgaaaccctgacaggagccctttcccagactcccggcgtcttcacgctggacggcggcggcacctggcagcgcggttccgtgagcaacaccgtcatccgcgggatgaacaaggaaacctacaccctgaccatggttgacggcatgcgcatcagtgatgtcaacatgtccggcaacaagctgctggggatcaccaatctctttacggtggacaatgtggaagtggtgaagggcgcccagggcgccgtcttcggttccggcgccattggcggcgttgtcgccatggacaccccggaaggggaaggcgatcccgtgaccaggatttttgcggaagccggttctttccattccttcaacagctacgcgacttcctcaggcaagatcaagaagctttcctactttgtgggcgtggggtttgaatccacggaaaacgatcccaccatttatccggccatttatgacaaccggaaaggcatgaacgacttccgccagtggcaggaagccgtgcgcctgggctatgacgtcaatgacaaggtgaaggtgggctttacctaccgccgcctggattcctactttgaataccccacgccgtatgtggattacgaccagtggcccgccgtgacggacccccacctgtacaacacggaagacaagaaccgcagcaacctggtgacggggcgcgtggatgcggaaattaccaagctgtggtccaccagcttcatgatcgggcattacaacatggactattccacgcatacgccgggcttcgatttccagcccaacgtgatgtgcaaccgccgcttccagacggaatggcgcaatgcacttacgtggaacaaggaatggaagacggtcgccggcatggcctgggaccgctccgactacatgagcgaaaacaattacgtggccaaggatgaatggcagagcacgcttgccttctttgcggagcagatgtgggcgcccacggacaactttgacgccagcgtggccctgcgcctggagcatgattccgtctggaacaaccacttcacgtggcgttattccaattcctggaaggtgacgggcaaggattcccccacccgtattttcggttccgtgggttccggattccgcgcccccacctactttgaacagtacgccgccaattacggctacgtgggcaatccggacctggatgtgtccaaatccctgggcggagacctgggcgtggaacagcgcctggcggacaaccattacgcttccgtgacgggattctggacccgcatcaacgatgaaatcggcaccaggagcgtaggcacgtggcccaactcctacacgacttacgacaacttctcccacgccacttcctatggcgtggaagtagcgttcaaggggcagttcaaggatgcgtggaacagcggctattatgccaactacaccttcacgatgcccaagcgcgactccatcggcaaatatgaaaccatccagatggccaatactgcccgccacaccatcaacgcggaggtttatacctctccggttgaaaaactgacggtcggcttcggcgtaacatccgccatgggccgtacggactacaactatgcccgtctggacaacttctttacggcgcgtttgttcgccaggtaccaggtgacggacaatgtggcgtttcatgtgcgtgtggaaaacctgtttgaccagaatttcatcatcacgaatgactataacttcggaccgcgccaggcccgggggctgggagtcttcggcggcgtgacggtcgaattctaattgcttttcaggactaattgttgattgcacccccatcttccgtcttgcgggctgtttcaggcgaagggaacagccacgggcggaagatgggctttttgttttccggtggttccggaatcggttaacatgcggcggtaatctaagctgtgtttcgctggctgtacattctgggggcgttggtcctcgccgtctttctgggaggagtcctttacttcgcccagcgggaagcggacgtttggcatgaggcctccggacggacggacggcaggggcatgcctgccgtgtttgacggcttcgtggaacggtggaacagatctgtggagcgggaactgctccgggaactggcaggcggcgagcggaagaaaagcctgctgtccgtctcccgtggcgatggggatgggcggcgtctggccgagcaggagcgttccgtggaacgcatcggcagaaggctggagctgaaagaccatatccgccagcttcccctggaggaggttcctgctggattggaatggcagaccggaatggaggaaccggaagtgggtgacccccgggccgtgaaaggggggctggtccggctgtggatcaatacgccgtttcccggaaccctgcgggcgttcggaccgggaagcgagacctttttcaactactccgccattgacaacgtgtggcttcccctggtggggttgcatccggaaaccttccggcccattccggggctagcggaccgctgggccgtctccgcggacgggaaaaccgttttttaccatttggacccggaagcgacgtactcggacggccgccccgtaagggcgcaggacttcctgctgaatatctgcctccgcacgtccggctttgcccgggaccccttctggaccaccctgttccgttccacgtatgaccagattacggtatacggggattccgtcattgccctgacgcttccgtcacccgggccgctgctgccttacatggcctgcgtggatttccatccggcccatcccggtttttaccatgatttcaactccctgtttctggaacgctaccagtggaaggttccgccgaatacggggggctacgtggtggttcccggtaaaatacggataggcgagcgcatcaccctggcccgcgtgaaggactggtgggcgaaggacaggaaatactaccgctattcctgcaatgcggaccaggtggagcatgtatttgtaaacctggaaaacaaggcggttgaaatgttccgccgcggggagctggacatgatgaacgtccgcaagccggaagtgtgggaaaacaggctggaactgccggaagtgcaccggggctacatagacaagtacagcctggaagccggttatgcctgccccccgtacggcctgtacctgaactgtgcggacaagcttctgaaaaaccccggcattcgcagggggctggcgcattccgtgaacatgggcatggtgattgataccctgttccgcgggaatatgagaaggctgggctcctacatggaggggtacggcgatctgacgcttccgctgaaagcgccggaatacagcaagaaaaaagccatggaacattttgcccgcgccggctaccgggaaatgggggaggacggcgtgctgaagaatgaacggggggaacggctggtggtggaactgaccttcgcggactcctccaccctgatgaccaatgtttgttccatcctacggcaggaggccctgaaatgcggggtggacctgcgcctggaccccctgacctataatgtctgttcccggaaggtatttgaaaaacggtaccaggccgccctgtgggcgtggccgctccagacgccgttcccccggctttatgaaacctttgcttccgagctggcgtacgatgcccgcggcaaccccgtgggcaacacgaacaatatctttgccgtggcggacacggaactggatgcggccctggacgcggagcggaatgccccggatggcgccgccctgaaaaaagcccttcaacgcgcccaaaagcgcattcatgaactctgcgtctggattcccggctggcgggaaccctacacgtacgtcgcctgctggcgctggatacgctggccggaatcccccacgcggttctgttccccccggatttacaaccccctggaatcccacttgtactgggtggatgaaaaaatgaagaaggaaacgcaggaggcccggcgccggggcgttccgtttgaggaaaggcatcaggtgatacgtgttgaaagaccggatgacgccgctccgtaataaaaccagcccgccggctcctttttaaattgaaaggaggcggtttttcatcataattccccttattattccctagaaccgtttattgactccattatcatgaaaatatcacttttttccgccctgtttctggcaggccacctttgcatggccgctcccatgcccctgccggaatccaatgacggcgccaagcatgtcttcgccaccaaccaggaaaacttcctgatggacggaaagcccgtcaaaatcatctccggggaaatgcactacccgcgcgtgccgcgtgagcactggcaggacaggttccagcgcatgaaggccatgggcatgaacaccgtctgcacctatctgttctggaacgtgcatgaaccggaacccggcaagtgggacttctccggcaacctggactttgtggaattcgtcaaggaagcgcagaaggccggcctgtgggtcatcgtgcgtccgggcccttacgtttgcgcggaatgggaattcggcgggttccccggctggctgctgaaggatgcggacctgaaggtccgctcccaggacccccgtttcctggaaccggccatggcttatctcaagaaagtctgctccatgctggaaccgctgcagatcaccaagggcggccccatcatcatggcccaggtggaaaatgaatacggctcctacggctccgacaaggactacgtgaaaaaacacctggaagtcatccaaaaggagcttccgggcgtggtgccctttacctcggacggcccgaacgactggatgatcaacaacggcacgctgcccggcatcgttcccgccatgaacttcggcggcggagccaagggcgcctttgccaacctggaaaagcacaagggcaagactccccgcatcaacggcgaattctgggtaggctggtttgaccactggggcaagcccaaaaacggcggcagtacggaaggcttcaaccgcgacttgaagtggatgttggaaaacaatgtctcccccaaccttttcatggcgcacgggggcacctccttcggcttcatgaacggggcgaactgggaaggggcctacacgccggacgtgaccaattacgactacggcgcgcccatctctgaaaacggaaccctgacggaccgctaccgtaccttccgccagaccattcaggactattacggtgatacgtacaagctccccgaaccgcccgcgcagccggaaatgatggagctgccgcccatcacgttcacggagaaagccggcatgttcaaccggctcccgcagcctgtcatccgcaaggagcccgtgcacatggaagccctggggcagagcctgggcttcatcctgtaccggacgaaagtgaacggcccggtgaagggagagctgaaaatgaacaacatgcaggaccgcgccatcgtttacgtggacggcaaaaggcagggtgcggcagaccgccgctacaagcaggacgcctgtgacgtggttattcccgcgggcctccatacggtggatatctttgtggaaaacatgggccgcatcaacttcggcggccaaatccagggggaacgcaagggaatccgcggccccatcacgctggacgggaagaagctggaaaacttcctcatctacaacctcccgtgcaagggcgtggagcttctgtccttctccggcaagaagccgggcggcgaccagcccgtgttccaccgtggatatttcaacgtctccaaccccaaggatacctacctggacatgcgggacggctggaaaaagggcgtcgtgtgggtgaacggccacaatctgggccgcttctggttcatcggttcccagcaggcgctttactgccccggcgaatacctgaaaccggggaaaaatgaaatcgtggtgctggacgtggacggcggctccggcacggtgaaaggcgtgaaggaagccatttacgaagtcaacagggaccctgccatggcggacgtcttccgtgtgggcaagcccgtagctcccgctgccagccagctcgtgcacaagggaaccttcgccaagggcgcggaccagcaggaaatcaaattccgcgctcccgtccaggcccgctacatcgccctcgtcagcaagaacgcccatgacaacggcccgcacgccgccattgcggagctgaatttcctggatgcctccggcaacctgcttccccgcgaacagtggtccgtggtctatgcggattcccatgaaacggcgggggaagccgcccaggcgggcctggtgatggacaaccagcccaccacctactggcacaccaagtggcagggagacaaccccacgcacccgcacatgatcgtgctggacctgggcaaggtacagaagctctccggcttccgctacctgccgcgccagaaccgggaaaacggccgcatcaaggactatgaagtctacgcgtctcccaagccgttcaagcctgtcaaatagggattcccggaaatcctgatctttccggggccgctccatcctttgggatggagcggcctttttccttttggagcacttttggaggcaacggaatcttcacgcgagcgcggcatgcgctggttttaagagcacgtgtttgctgatgccttggttaccgcatggcatgcgtctcctccccccggcatgaaaaaggcggctccgtggtgtacggagccgccgggaggcagtaatgaactcaatgattaattgttagaagttccaggagaagcccagcttgatggtgtggtagccgggatcactgtagccctgaatctggtaatattcatagccgatcaggaagtcagcgctcttggagatgctgaacttgaacccggcctgggctgcccaggaaaacttggtggtggagatggtgtgggaacggctcccgtcttccagcccgtggatggtggttttaatgtctccgtacgtggcgcccgccttgccgcccagatagaacatcgtgtaatcgccgatggggaggttcagcgtataaccggccatcatcggaacgtaggtggagcggacgctggcggtataggggccgctgatgcccaggtcatgcacgctgggatggtgggagcctgccagaatgccgccgttcagggaaatctgatgaacaatgctgccggtttcaatgtaattgaaaatgctcagattgccgccggccacgttgggcatggcatccttggtggcgatgccgtaagctccttccagggacatgccgaactggccgtcgtatttgtcggcgtggtaggcattggcggcggacacggaggccacaagggccaaacctagcagtatagtcttgttcatatggggataaatggtgaatttaactgtggttcattcttggcagttttctcttttgaagtcaaacatgaaatgtcaaatttgcatgaaatccccgggcaccgggagatgaagttgccagaacgggcccggtggggtacattctgcgccatggaacaacaagcgtgtgatttgctggtgaccgcttcccgcatgctggcgggcgcggggcaggccggcgccgccggaaatgcggccgtcgccgtccgggacgggaaaattctggaaacggggagtgccgcagagctggaagcccggtggaagcccaccgcccgcagggacctgggaaatgtcctgctgatgccggggctggtcaatgcccatacgcacgttccgatgaccttcttgcgcggctttgcggatgacctgcctctgatggaatggctgaccgggcatattttccctgtggaagcccgcctgacggacagaatcgtctccctgggggcgcggctgggcatgtatgaaatgatgcggacgggcacgacggcttttgtggactcctatttgctggaaatcaacgtgctccgggaggcggagcgcatgggaatgcgctgtgtgggcggggaggctctttttgcgtttccctctccggcgtacggcggatgggatgcggcggaagccctgtaccgggagcaggcggcgcgctttgcgggccgcggcagggtgcaggtggccctgatgccgcacagcgtatacaccaccagtgacgacgtgctccggcgttccatgaagctggcggaggaactggacctgatgctgcatatccatctgtccgaatccgccggagaagtggagcagtgccgctccctgcacggggacaggcgcccggtggcttatgcccgggacatggggctgctgaatgaacgcaccgtgctggcccacatggtggacgtgacggatgaggaactggaactggtagcctcttccggagcggcaatcgcccacaacccggtcagcaatttgaaactggcttccggcttcgcccgcgtgcgggacatggcgcgggccggcatttccgtctccctgggaacggacggagcgtgcagcaacaacagcctggacatgtttgaaacgatgaagctggccgcccttcttgccaagggatgcagcggggacgctaccgcggtgcccgccacgcaggcgctgaacatggccacggcggagggcgcccgcatcttccggacgccggggctgggaacgctggctccgggagctcccgcggacatgattgccctggacctggatgaaccgaacctctgcccgattttcaacgaagcgtcccatgccgtttatgccgcttccggcaaggactgcgtgttcaccatggtggaagggaacatcctgtacgaccgcggaacctacacggacggcctgtacgcagacaccgccgcggaaatgcgggacctggtggagtgggtgaaggggaaggaataaagacggaagactaaatacaaaagagaaaatagtctttaacaggcatttcccctctatttaatcttttgtcattggggcgccgttcaggcggcgcatgctcatattccttctttacccgcaaggggggatgcctttatagtaatttcatgcaatatgatctcatcgtcattggtggaggccctgccggctatgtgggcgccatccgcgccgcccagctgggaaaatccgtggtgtgcgtggaacgcgaccgggtagggggcacctgtctgaactggggatgcatccccaccaaggcgcttctgaaaaatgcggaggcttacctgaccgtgacggcccgggccaaggaattcggcatgacggtggaaggcgtcagcgtggactggagcgaggtgatcggccgttcccgcaaggtcagcgaccgcctggccggcggcgtgggtttcctgtttaagaaaaacaaggtggactccgtcacgggggaagcctccatcaccgcccccggcaaggtggaagtgaaggccgccgacggaacgacgagcgttctggaaggaaaaaacatcctgatcagcaccggctgcgtcacccgcacggtgcccagcctgcccctcaacggcgccaccatcatcggttccaaggaagccatggtgctggaaaagcggcctgaaagcatgatcatcatcggttccggcgccattggcacggaattcgcctacatttacaactccttcagcaccaaggtaacgctcattgaagcgctcccgcgcatgcttcccaatgaagacgacgattcctgccagacgctggaacgcgcgttcaagaagcagggcatcaaggtcatgacgggagcctccgtggaatccgtcacggaaacctgcgacggcaaggtcaaggccagcgtgaaaaacagcaagggacaggaagaggaaatcacggcggacgtctgcctggtggccatcggcgtgaagccggtcgttcccgccgctcccggcctggagctgacggaaaagggattcatcaaggtgaatgaccgctacgccacatccattcccggcgtttacgcggcgggcgacgtgatcggcggcgtgctgctggcgcatacggccacctttgaagccgtgcaggccgtggaaggcatgtttaatccggactaccagcccaggcaggtcggcttcttcccaagctgcacgtactgctacccgcaggtggcttccgtgggtaaaacggaacgcgccctcaaggaagcgggcgtggagtacaaggtgggcaaattccccttccaggccattggcaaggctgtggccgccggagaaacggacggcttcgtgaaaaccctgtacggcgccaaacacggcgaactgctgggcgcccacatcgtggggccggaagccacggaactgattgccacgctgggcgtcggcattcaggcggaactgacggacgaggatattcacgccaccatctttgcccatcccacgctgtcggaagccatccatgaatccatgctggcttccgagggaatcgccatccacatgtaacggttttcacgggaagagccccggaacggggctctttttctccgttaaaaaagatgaacggtaacctgcgctggaaacaaaggcttcaaaacctgaataaggctttttcccggttgcgccatgcttgcgcgttgccggaatacaatgaattggaaatggccggactggtgcagacttatgaatttacgtttgagctgtgctggaaaacgttgaaagataaactggtctatgacggctacagcgttaacagcccccgcgaagccatcaggcaggcgtttggcgcaggcttgataggccatattgattgctggtttcaggcgttggaaagccgcaatttgtttgtacatacttatgatgattccagcgcggaagaggcggtttccctgattaagggaaaattcttttccatgctggccccatgtgtggaaaatctgaacatgatggcggagaaagaggactgaacgatggcctgacggccaaggtgcgctcaggcatccgggaaattctttcacagactccgcagattaggaaagccgttttattcggttcccgcgccctgggcacgtggaagcctgcgtccgatatcgatcttgccctggagggcgaggacctggatttgtccgtccttttgactctccaagcgcgtctcacggagttgaacctgcctgtggaggtagacttgattattcgtaacagaatcaccaatcctgatttggagcgtcatatccatgcttatggcaaggagtggttttcccgttccatggaatgaagggattttgatcccggagaacccctgtaaaacaggaaagacattcagtctttcctctttagtatttagtctttttctccccggtcctcatagctcaaacaccggattctccacggcgtttttcaccgcaataaggaactgcacggcctgcttgccgtccaccaggcggtggtcataggaaagggccaggtacatcatgggccgggcgacgatctggccgtcccggaccacggggcgttcctgaatggcgtgcatgcccagaatgccgctctggggcgggttcagaatgggggtggagagcagggaaccgtaggttcccccgttggagatagtgaagcagcccccttgcaggtcctgcatggacaagcttccgccgcgcactttttccgccagggcggcgagttccagttccagttccgggagcgttttccggtcgcagtcccgcagcacggggaccacgagtcccttgtccgtgccgatggctacggaaatgtcgtaatacaggttttccacgatgtccgtgccgtcaattctggcgttgacctggggcacttcctgaagggccttgaccaccgccttgatgaagaagctcatgaaaccaagcttggtgccgtaccgttcccggtacgccgcattgaattgtttgcggagctccatcacggcggacatgtcgcactcgttgaaggtggtgaggatggccgcctggtgctgggcctccaccagccgggccgcgatggtgcggcgcagggggctcatgggtttcctgatgaaacgcggggcggtttccttgtcagacttcccgtttttcccggcgggaggctgttccggggcggacgtttccttttccggcttttgttccggggattcggccgcaggaggagggggggtggaagcgggttcctcccgtgttcccggcgctgtggttttctccggttccggcggtacgggagcctcttccttttccggtgcggctgcggttccgtcagcggaagaaatgcggcccagagccgcgccgatgggggcttccgctccttccgggacgaggatttccagcacgccgctttcgtccgcctccaggtccgtggaaaccttgtccgtttccagcgtcaccagggtgtcgcctttggctaccgggtcgccggcattcttgtgccacgcggctacggtggcggtggtgatggattctccgaagttggggatcaggatgtcgctcatgggaggaagatgggttcaggattgcgcccgcggcccgaaggcggtggcgatgagtcttttttgcgcggcggcgtgcagggccttggcgccctccgcagggcaggccatgggcggccgccccgcatagcggaaggaggtggcgaagaggcgccccagcctgttccgcaggtggccccaggcccccatgttggagggttcctcctggcaccagacgaagtcgcgcaccttctggtagggggccagcaggtaggtgagctgttcctgggccagcgggtagatttgttccaggcggataatgattgtgtctgaaatattccgttccttccggtaggcggccaggtcatagtaaactttcccggtgcagaagacggcgcgcgttacctggtccggcgcgggagcgtccgggtccggcagcacttcgtggaagcgggagggaaccaggaattcccggtgcggggagacggcctccggacgggagagcaggcttttgggcgtgaagacgatcagcggcttgtgcacgttctggtgcacctggcggcgcagggcgtggaagtattgggccggggtggtggggttgatgacctgcatgttgtcgtccgcgcagagctggagatagcgttccatgcgggcgctggagtgttccgagcccgccccttcatagccgtggggcagcagcagcacaatgcggtttttctggtgccatttggcctccgcggccgcaatgaactggtccacgatgacctgcgctccgttggcgaagtccccgaactgggcctcccacatgaccagcgcgtccgggctttccagagcatagccgtattcaaagcccagcacggaggcttccgacagggaggagttgtaaatgcggaacgcggtagtgccgtggttcagcttttccagaggagtgtacagggagccatcattgaagtcatgcaggacggcgtgccgctgggagaaggtgccgcgctggcagtcctggccggacaggcgcacggtgtggttttccgcgagcaggctgccccaggccagggcttccgccatggcccagtccagcagtccgccttcccggaaggcctcccggcggcgggccaggaagcgtttttccagcgtggggtggggcgtgaagccgtccggcagttccgtaaggatatctccgatgcgctggaacagctccgggctgattcccgtccgtacgctggtacgcgggatgggcgtttcatccgcatcctgcgcggtggcgggcaggatgtagtccgcggggttttccttcatttgcaggtaggcctgttccatgccttcccaaaggtctttccggatgtcctgctcctgctgttctgtcaattccccgcgctctctgagcgccgttccgtacagggctgcggcggtggggcgcgcctcaatccgcttggtctgcatgggcgcggtgaaggcggcctggtccgtttcattgtggcccaggcggcggtagcagtacatgtccagaatgatgtcccgcccgaacttctggcggaactggagcgcgaattccgccgcccacaccaggtcctccgggctttccccgttgatgtgcaggatgggggactggagcatctgcgccacgtccgtggcgtagcgggaggaacgggcctcgtccggtccggtggtgaagccgatctggttgttgatgatgaggtgcacggtgcctcccgtgcggtagcctttcagcagggaaagattgagcacttccgccacgagcccttgtcctgcgaaggcggcgtccccgtggaggacgagcggcagcacatgcttgcgttccgcgtcttccaggttgtgctgcatggccctggccctgccttccaccacgggatacacggcttccagatggctggggttggaggagaggcggacgtgaaggtcgcggccgtccacatggcgcgtggtggcgtagccgaggtggtatttgacgtcgctcctgccaatgggggattccggcaggtagtccggcgtgaattctcggaagatggttttcagcggcttgtggaggatgttggcgagcacgttcagcctcccgcggtgggccatgcccatttcaatgtgggagacgccggcggcggggcagcgcttgacgatggcgtccagcaggacgatggcaccctcccccccttccagggagaagcgtttttccccaatgaagcgcttgcccaggaattcctcgaacaattccgccttgcagagatggaagaaggcgtcccgccggacctccgggccgtagtccacgccgttcgcccggagcttgattttttcttcaatccaggagcggatttccagattgtctatgtggtggtattcaaacccgatggggccgcaatagattttttgcaggtggctgatgatttcacggagggtgaacgtgccgccgtccatgaaggtgccgatgttggcgggctggtccaggtcttccggacggaagcccatttcttccagattgaccggggtgcaggtcttgtccggagacgccaggggattgaagcgcgcgcactggtggcccatgacccggtaggcccggatgagctggttgacgcgcccccggcattccgcgctttccggcgggacggtgtagggggaggcgtccgtgcagttccctgcgtttgctttttcctgcggagcgttgccgctccccagttcatagccttcaaaccaggcggcccagagagggtctacggacaggggatcgtttttccatgattggtggagcgccatgatttcctcaggcgggagtctggagaagatggaggcgttcatgccgaaagatgggttgatacggggctattccatgttcactaatcgctattctctgcccgcagggcgtcaatagctgtgttcgttgagctggaccttcccgcggaagacccagtagatggcggcggagtaggccaggacgagcggcacgcccaggatggcgatgtacgtcatcacgaccaggctttcacgcgtggaggagccgttgacgagcgtcagggagttctccgggttgggcatggaatagagcaggttggggaacatggccgccccgaagagggccatcatgcagcccatggtggagcaggaggcgacgaaggcccagcccggacggttcctgtggatgaagatccagatggcggtgatggaaatgaccgccagcaccgcgatgccgtaaatccagggggagcggtgcagggccgccgctacgtgcggcacgtacagcagggtggccgctccgtgaaggatgatcaggacggtgaagatgatgacgcagggcctgagcagttttttgatctgttcctgcaggcttccctgtgttttcatcaggaggtagatgcctccgtgcatggcgaacagggccaccgtcgtcagccccagaagaacggagtaggggttcagcaggctgaggaaggttccggtgaagttgccctgatcgtccagcggaatgcccttggtgacgttccccatggctacgccgatgagcagggcggccaggaggctgctgatggaaaaggtggtgtcccaccccctgcgccaccatttcatgggctgcttgctccggaattcgatggagacggcgcggaagatgagggtgagcagcaggagcatgaaggccaggtaaaacccggagaagacggaggcgtacacgtacgggaaggcggcgaagagggcgccgccccccgtgatgagccagacttcgtttccgtcccatacagggcccacggcgtttagcgtgagccttctgttttcatcacccttgatgaaaagctgaagggctccggtgcccaggtcaaagccgtccagaatggcatatccggagaagagcacgccgacgaggatgaaccagatgatttgcaggtctgtaagagtaagattgtccaacatggttttaagaggggctgaaggttagtctttgacgaaggggacctggagcttgccttccccggtgccgtcgtcttcgtttgcttcctggtccggacccttgtggattttatgggtgatctgatagaggaagagggccagcagcagggcataaatgacgaagaacatgcccagggaggaaagggcttccgccgcggtgagggtgggggatacggcatgttccgttctcaggatgccgtacacgatccatggctggcgccccatttccgccacggcccagcccacctggttggctatttgggggcccagcacggagaagacgaagcaccagagcagccagcgcttctggaagagccagccttttttccagccccacaggcccaccaggaacagggcccccagggcgcagccgatcaggatcatgatgtggaaggagtagaagacgggcaggatgggggggcgttcgtcctgcgggatgtcgttcatgccggtgatggtcgtatccaggtcatgatgggtcaggaaggtgagcatgtacgggatggagatgcccgtcacttcatgggtggacgggttcatccagccgacgaggtggagggccagcggagcgccggtttccatcacgccttccatggcggcgaatttggcgggctggtggatggagacttcacgtgcgctggagtcccccgtgatgcccatgcccaccacgccgatgaggccgatgaccagggccaccttgaagcttttttcagctcctccggtgaagcgttttttcaggatgtaccaggcggagacgctgaggacgagcgtggcccccgccagccagcagccggccagcgcatgcgtcaggcggtccacggtggacgggttgaacaccacgtcatagaagctggtgatatgggcctggattttcccgttcacttccaccagcttgtacccggcgggcgtctgcatccaggagttcgccacaatgatccagatggcgctgaaatgggcgcccagggcgaccatgcaggaggagaagaagtgcattttggggcccaccttgtcccagccgaagagcaggatggccaggaagccggattccaggaagaaggcgaagatgccttccgccgccagagggctgccgaagatgtcgcccacgcagcgggaatagtcagcccagttggtgccgaactggaattccatcacgatgccggaggccacgcccagggcgaagatgatgccgaatatcttggtccagaatttggcctgcttgtggtagagttcgttcttcgttttcagccagaggccttccagcgcgaccagaaccacccccaggccgatggtcatcggcgggaagatgtagtggaacatgatcgtaacggcgaattgaagacgggataataagaccggatcgtccatgattgcttggggatgagtggatgtttatggaacaggaggccggcagccaaataccggtaccttcatactttatacatcccaagaggacctttgttcaattattttccttttccctgaataacttttttagattgtatctaaaaaagaacggtttagcactgaatgaacacgtccatcccctcttccgccagggcaaaaagatccagcatgtcgcggggggaaaggcggatgcagccatgggaggccggggcgcccagcaggtccgtatcattggtgccgtggatgtagatgtagcggctccgcgtgttggcgttgtgcggttccaggccgtccagccacaggatgcgcgtcaggataaagtccgaatgttcatccaggctttccgggatggcggcggggtagcggcctgccggaaggcgtgagatgaaaatggtgtcctccggctctccgtccccgattttttggcagacgcggaaatgtccggtgggcgtttttccggagccctcttcatggcccgtgccagcttttccgctggaaacggggcaccggagcaggatgtttccggattcttccagcaccagctcctggcgggacaggtcaatgcgtatggaaggggcggccatgggggaggaaagagttgtcacgcttgctgttccatccgggcgatgatggcctggatggcggctgtcaactgccgcgccacgctgttgtaggcagcctgaccgcagccgatggggtccgcaatgctgcggttgtccgtgtagcaggtgaccagcctgatcttgtccgcatgctcggggaaattggcaagcagggcggccaggtggctctccgtcatggcatagacgtccgtggcgttttccatcagttcttccgtgacggggcggctttcatggcaggagaggttgacgccgtgcgcctggaggatgtggagcgtttccgggctggcctcctgcccgtgccatgcggaagttcccgcggaaccggcgcgccattccggatgatgcgctgaaagcttccggaacaggccttccgccatggggctgcggcaggtgttgccggtgcagatgaaaaggatgtgcttgcgctgtgtcatgagtcgggatgttctcttttggaatggtgggggataggcacctcgttgggttcctggtacaggttgtccggggggagcacgtgcccggctccattcccctccggcgggggggctccggcgtcttcctcctcctcttcgtccgcatcgcgggaggggggggaaagccaggggaacaggcagcccgccagcactacgcacagcaccgccgccacgggcgtcatgacggggaaccaggtgtcatggacggaaaacaggtaccacgcgatgaccggggccgccaggatgcagagcccccagatgatgaaacgcccccggcgctggaaacggagggcccagactgccaggagcaggacgtccagcacgatgacccactgcacccatacgggggctaccggaatcaggacggccggggccggagccagcgcccccatgagggtgcggatggtttgcgccgccaggagggcctgtgcgtccggcgtgtcggaaagggcggacggttcggaaacgagaaccgcgtccgcggaagaaagcagttttctgacggcggtggtatccggcggccgcaggccggacatgacggggacgatcacctccttggtgtccagcatggtggggctgctgtgttccgccagaggaatgcggccgtatttgtccagcggaacggaacgcttgccgcccaggaaaagggtgtcgcccggaatgattctcacgtcgccgggtttcaggtccagcgcgttcagggcggcggccagcggaagggtggggatgatctcctcaccccagcggatgaaaagcggcggagaaaccctgttctccggggagggggaaaacagttcgttgttttccacgacggttcccagggcgggggctgccgtggtcagttgcggagcttcccccaccagcctgtccgcgcgcgggaacaggtccgtctttcccacgatgttggcagcgggaataaccaggcctttccagtccggcgggaggggggcgtggcgggaggactcgctcatctgccgtcccagcgccttgtggcggaagcggtccagctcataccccacggcggccttgacgatgctgtccggctcttcctcccaggccatgggagccatcacgtaaacattcctggccccctgctcgtacaggtggcggaacagcaccgtgtaatccatgggattgggaggataggcggcaaagctgttcagggaggattcccggtgcagggaaaccacgggaagctgggccgtctgccccttgttgaaataatcgtaaggctggaggacgatgctgctttccgcattcagaccttccgggcgcacggtccggtactctcctgccagggaacgttccgccgcccgctcataacagaaaatggtgggcggaagaaacacgtaccccagaatccagcccagccccagggaaatctggaacagggacagcacaagcaggaatctgggggtcagcgtcatcaggagcagggagaaagatcatgctagcatggccgccagcggttctgcaagcgtggagccgggcagaagcttccgcaggtgttccagcccggcgggaatctgggccagataccaggtttttccctggttgtggccgatgttggcgtaggcgcccagcatctgcatgagccgttgcagggcgcaggcgcggaagatgcggtcatccaggggttgccctgaaatcttttcccactccctgagcaattcctccgcctgctccggttccagacgggcatagccgtcataaaccagggaggctaggtcatactccgggcgtccgccgcgcatgccctggaaatcgatcagccaggtcttacccgcgtggatgtgcacgttctgggactggctgtcccggtgcacggggcattccggaagggaggccaggaattgcgccagctcttccagggccggatggttcaggaaggaatccgtttccagccccaggtgggcccccagcaggtgttccgcaaaataggactgctcccagcggtacagggcttcgtcaaaggcgggctggagggggaactcctccggaaacgggcaggagtgaagcagatggagctgctccatggcccggatgtagcgcaggcgcagggagggccaggactctccccggaaggccagcaggctggcgtctcccaggtcttccaccagcgcagccccgcagccggcgccgagcggttcgtagtcgtaaatctccggcacgttcacgccgtgggcgtgcaggtgccggtccgcggggatgaaggaatcattatccgcgcggtcattgccccaccggatgccgatgcatgtgcgggagccgaggcggatgcggacgatggtgcggccggacgcgcccaaagccaaggtatggaaatcctcttcccgcggaacgacgtggaaactccgttgaaccaggctggacaattctttcatggagaggcgtggcggaagggccttgcggaaagggggcggacggagggcagggaaatcctccctccgccggaaacgatgaaggggatgaaatcaggaggggaactggcggtcttccccgtagccgtaatgctccacgacgtaatccacatccttgtctccgcggccggagcagttgaccaggatagcgcctcctctgttttcccgggcccacttcatggcgtaggcgatggcgtgggagctttccagggcgggaataattccttcatagcgggaaagcttgaagaaggcgtctacggcttcctcatccgtggcggtaacgtaattcacgcggccgatgtcgtgcaggtaggcgtgttccggacccacggaaggataatccagcccgctggccacggaatggaccggtcccggattgccgtcctcgtcctggagcatgatgctctcgaacccgtgcaggacgcccctgctcccgtaggagatggaggcggaatgatccccgagcctgggccccttgccgagcggttccacgccgtaaatatccagcgggtctcccaggaaggcggtgaacatgcccatggaattgctgccgccgcccacgcaggcgcacaccgcgtccggaagaagccccgtcatttccatgaactgctccctggcttccacgccgatgcacatctggaaatcgcgcaccatctgcgggaaggggtgggggcctaccacggaaccgatgcagtaaatggaatcctgataactgttcaggtaggaatcaaaggcggaatccacggcttccttcaggctctggaggccgtgcgtgacgggcaccaccttggcgcccaggattttcatgcgggtgacgttgggggcctgcttggcaatgtccaccgctcccatgtgaatctcacactccaggccgaagaaggcggcagccgtagccagggccacgccatgctgcccggcgcccgtttccgcaatgatgcgtttcttgcccatgtatttggcgagaaggccttcacccatgcagtggttgagcttgtgggcgcccgtatggttcaggtcttcccgtttcaggtaaatctgggaagtgcccaggtggcgggaaaggcgttcgcagtggtaaaccggggtggggcgtccctggaactgcttgcggatgcggcgcagttcattgatgaactgggcggagtgggctatcgtctggtaggcttccgtaatttcttcaaaggcgggaacaagctcgtccggcaggtaaacgccgccgtattcgccaaaacggccctgggcgtccggaaaattgcgtaaataggtatggagatccatggtctgttgcattcgtgactgccagtatttagcacgatgccccagttcaggcaaaaacaatctccgcaggaagcccttttaaaaaagcggggaagggaaaaatcatccgcaggggggagcggaacggaccagtccggaaggccggaaatcgggatgggaccggacagggatgccggggatggccggttcatggggaatctccgttttgaggccgtgaagaacgcggcctgctcctgctgcaagggaaggaagctcctccctgttcaccatgctcctgaataaatagtaaaagaaagggcaggcgttgccggagatccggcttccggacttttttacccggaaaggaacggagggaagaaggccggaaatcaggccaggcggcgcttcctgatggattttccggtatcggcaagcgtctgccgtgcgtcggggtccgctccggccatcagggcggccaggtcccggacgatattctggcgcatgcggtccaccaggtcgcgcccttcctgggtgatggcgaccatgattttgcggcggtccttggccgcgctcatgcgtttcagatagcccatctcctgaagtttgtccaccatgccggtggccgccgccgtggaatgccccatcttcagggcaatgctggacatgctcaggaagtcctcgctggccaggtaggtcagcaggaaaaactggggataggaaaccttgccctcattcaattctgaagaaagattcagaatgcaggaacgttgcgtgaacaggatgaaatccgccagcttgtttgcttcttcggaaatggagctcatggtcgtggtgaatgtctggggtaggtttggtaacggtgccgtccggaggcttggcggcggttcagccaacctaccgccgccgccttccgcgagcaagtcaaaaatataaatttttattaaaattttacatttgcagataataagccttttgatggtattccggatacaatatgttgaatgttaatagaatgattgtattttgaggatagaatgtgaataacatgttaaaaatagtcgtaagctgttgatgaatgaaagttttttccggaactgccgggaaaccggcataaatctggcataaaagggcgcgtcagcatgacaagcccggacaggaaagaggcctcatgcaagggctctccatgggaaagggaggcctgtttcagaaaagttttatacgggtgcgcgccaggaaaaacaggatgctgccgcctttggaggcaggtcccgtcatcagttctggactgccggagaagagaaaaaagccggttctacccccggaaattcttatggatgcctggcgggcatcggcaggcatggctcattgttgagtccgggctgctttatttgctggacaggaatgaaggcagggaaaacccctttaaacgggcctggaagggtgcagaaagggaaagacggcgggttgcctgccatgccgatgaacaagcgtgttctagatacgtctggcggcgaatgcttccccctggaggaaccagtgcatcccgtcctccgtggccatgtttctccaatggaacgtattttccgtaagttcggaaaaaatccatttcatcttttgcccggtaatttccgtcaggacaatccggctgccttcctttctcgcttccagccgcgtggcttctccggccacaccgtaaaaaatgtcccatgtccgttgctggggattgtaaattctgatcgtcgtgccgtaggcggcgtccggccaggttttgatattccgggcctcccgggaagggcagatgaacacatcctggacggccatgccttccaggacccatgaaaaaatccattcccctttcacgtggcgttcatgctccgtgccgtgcccgtcaacccattcaatatcccaggttccgacgagggggccgaaccagttgtccttctccggaatgaggctgtttttccccgggctcaccaaggctgtttcaaaatcattcatctttaataattccatttaaaaagtcggttacacgtccaggcgcattgtccgggatgctgttgtaaaatgttcacgctcgtaaaatcttctgccgctgccgttattctcccataccatgagttccaggtattcctggtttcgtgattttgtccagcgtttgactttatccaaaagcaggcgtcctgttccattcctcctgcatccccgcatgacgaaaaagtctatgatgcaggcatatttatgaggaactacggaaggatagggaggtggcgcgttttcttcaacatgcacgaatccgataacggcatcgtctctttccgcgatcatgatatcgccgctgccgctttcaatcacaggattcgggcaatctcccgtttcagttgccgcaacgcaattttccggtagctgggcagcattacaggcaaaaaaatcatcgtatagagcgcttgttttttggacatcctcccttgcagccgaccttatcttgatgttcatgcgctcctgatagccgaactgttctgccggccattctccggaaaagtgttttcatggggaaaacgtgccggagaatggccggaaaagttcctgaataagttaattggcggggggaggggtaaaggtgcgggccgccagctccttgtccatgagcagcattccctggccttctcccttgatcatgcgcagtttgctgatgatgtccttgacggtttcttcctcttccacctgttcactgacaaaccagtgcaggaaaatatccgtagcgaagtccttttcctccttggagaggcggaccaggtcattgatgcggcgcgtgacctcctgttcgtgggacagcgtttcttcaaacatttccagaatgttggaccagctcgcggccggggcatcgatggacaacatggtaaactggcctccgcgcgccagaaggaaatcgtaaaatttcaaggcatgggcggtttcttcctggtactggacgcgcatccagtgggcgaaccccgtcaggccggcgtcctgcaggtaggcggacatggccaggtaaaggttggctgaatacatttcccatttgatttgctcattaagagcggttgccattgttgtactgatcatatgtaaaatcctgttgatttccttttcttctacaaaacaaagtccgcagaatcaagataatcctgcggactgtatgacgggggaattcgggaaaggcgtcaggcttttgcggcaaccgtctctggaacattttccgcaggaagctcttcctccacgggaggggcggctgcttccgcaggctcggctgccgtgtcagtttcttcagcgggttcctcccgggctgccggggcttcggaagaaggggtgtcctccttctgctcctggggcgcggcggcttccgccaccggcatgtccggatccttctcttccggtttctgcttctccttgggagcctttttgggagagggggcctgggccggaacggccttcggacggctgacggtgttgttggagaaaaccagaatgtagccctgttcggacagccagaacaggtcgcggaccagattctgctgtttttccgtagcctgggccacttcctcttccgtggccttttccgggtccggcacgggggccagctccctgagcatggcgtccacgcccttgcccggattgttggccgcccaggtggcgatggacatcagggaatccgaaagaacggtgccttcttccatggccttggggcgtgccgggccggtgtaatggttgcccttccacttgaaaatgggcatgtggtggcgcgccagcccgtggcagaggttcggaatcagcatgctgggatggcggcgcgtggtgccggacaactggatcaggtgcgcccacaggccgggggaaagatggtttttcttcacggctccgttgacgaacaccttgtccgtgacgtcatagcactcttcaaagtggttggactcgaaatcctgttccacggcggcgggggattccagaagaacctcggaggcgccttcgcggacgggcttccaggcggtgcgcttggaaacggcttcctgccatgcctgcacggcttcctcgctcttgtccgtcacgatcttggaacggaatgcctcaaagggcatgctggcaaacttggtgcggtgcaggttcatcagggcggactggtagccgtgccagttgacggggcccaccagttcattgttcagggaacacttggcaatcgccttgaaatcgcccttgggcgcttccacttcctgttccacggactcgtaatacttgggcatccaggaagactgccagagatgcttgacggcctcctggcgggaaatgaagcaggctccgtcgccgtgcttgcagtggtaaaggtccgggccgttctcctgcttcatgaacaccaggtcataacggtcgtaggaacccatgaccaccttggcaaggtccagcagggaaatagtgcggcggtgcttctgcacctcctggtgcagggcggccaggccggaatccacggggcgcagctccacgcgcaggccttcggccggttccgccatgggcgggcggggcgcctgttcgcggcggtctccgtcgcggcgcgggcggaaggaaccgcgggtgcggtcttcccggttgaatcttctttcaccattctgaccgtcaaaacggcgttccccccggggctggcgtccttcgcggctgtcgcgccgcggacggcggtcgcctccctgcctgtcgccggacctgcgttccggataggacgcggaacgttcctgacgggctcccggtctcgcccaggccggaccgaattggaagtcggccaagccggaaaggtccggaatttgctgcttggggtctgtggaaggagtttcttcggtcatcatgtacgggttgtttcaatagcaactaaatgaggtagatggcaatcattttacgtgcaaacaggccgaaaattgttcaaaatgtcatgaaatgcatctggaaacgcaaatatttccggtgcattcttccaatccaacctttgtcaaattctctattatggataaaatacgtcaacgcctttccgatcttggttacgccatttacgatgcgcccgcgcccgtgggttcctacgtgcaatgcgtgcgtacgggcaacctgcttcacctctccggcggcatctccgtgaacggggaggacaaatacttcggcaaggtagggcaggacttgacggtggaagaagggcaggccgccgcgcgagccgccgttctgaaccgcctggccgtcatcgtgcaggccgtgggctccctggaaaaggtttcccgcattgtggccgtgaacggatttgtgaatgccggcccggatttctacgaccatcccaaggtgctgaacggcgcgtccgacctgctggtggaagcctttggcgaaatcggccgccacagccgcacggccgtgggcgtgtccgccctgccgctcaacgtggcggtggaaataagcatggttgtggaagtctgcggctagggatttaaaaaccggaaggggattcgtgcttgaatccccgcggcattcctgtagagtgccgtccggtcaatgccctcgtggcggaatggtagacgctgcagacttaaaatctgttgtccgcaaggacgtaccggttcgagtccggtcgggggtacttcgctgaataacaataaattatgtagataaaaggctcgcttctggcgggccttttccgtcttcaagcatacggaaattaccgcttttacttgtatctccggtcaacaatagttacctgaagaatgtgttgaaaggagcctcccccagtactgccgggtggggtattctccctgttttgcgatgaaatcatctggttttccgtaaaaggccccggggcatttatgttcaagcgtcccttgcaggattgtgtagtgacgctgtccggggtcccggacagccgggcacatggaattttgggtaggagccattttttgttagaggtccggtgttggcccattccttctcttattgaccaaaaggtttttccattttatattggaacccattccgggggtctccctgccgggtttccggtacccatccccacaccctatgatgaccatgaatttgaacaaactctccgtttgggcggtgggcgcctgcctgtgtgcggcttccatttctcacgccgctgccgctggaattgactcttacgatgccgctttaaagaaggtaaaggaagtgaaggcggccctcgaccccttaaagtcaaaaaacaggctgaagaactgggtgaatctcgggttgcagctggaaggcttgaaaaagggaagcgacgtgaatggcagggacgcgatgacctggtctccactcgcctgggcggcgtatgtgggagataaggagatttttgattacctgctgtccaaaggcgccaaccccaaggctgtggaccagtacggcatttccattttcatgagagccgtggaagggggcaatatggacattgtcaagtatttgatggaagaatgcaaatatgacgccaatgaaaaggaccgggaattcggcacgaccgccctgatgagagccgcaacgtgcaggcgcaatgacattcttgcctacttgattgacaggaaagccagcgtgaaagccagggacaagggaggccggaatgtgctggcgtatgccgctgatggccggaatatggatggaatggaaatgctggtggctaaaggagcggatttgaatggcacggacaaggaaggccactccattttgatgaaggcttccgagcggggatgcctggatatggtcaagtacctcgtcaaaaagggagccaaggtaaagggaaagaccaggcatggaaaaaccgcgctgatctatgccgcggagggcggttatctggacgtggcgggatttctggtggatcacggagcggacattaaggcaaaaaataaatggggtgatacggtgctggatatcaaaacggtggatcctgcggttaagaactatttacattcaaagcttaaagtgaaatagagcgtctatgctggcaggagccgtttattggatgggaaagcatttggaccgtggctggaacaggaagggcaggatagccgttttcattttgaaagcggcgggaggcgcctttctggcgctggccttgttgtcggcgggagcggagtggtacatagcttccgcttccggaggcagggtttttgagcattccgcggatgttcccgttcgcgcgcctgccctggtgctggggtgctcccctgcgttcatgggaggccccaacgggtatttctataatagaatggatacggcggcggaactttggagggccgggaaggcgacggtttttgtcgtttccggggacaatagctcccacgcctacaatgaaccggaatggatgaagcaggccctggtggagcgcggcgttccggaggaccggattgtgtgtgactttgcggggctgcggacgctggattccgtcgtgaggatgaaggaggtctttggcgtttcaaccatgatcgtcgtttcccaggaatttcacaatgaacgcgccctggccatcgctgcacatgaggaaatggacgcgtgggccgtcagcgccccggatgttcccaaccgcagttcacgcattaaaagctggttcagggagcgcgcggcgcgcgtatggatgatgctggacttgtggctgtgggggcgtgaaccccggttcctgggggaacccgtggcagtgccggaagtaaaaggggaaaaatgatcaacgcctcatgcggcctggagcgtcatgaggcgtcttttttcatgcggaagggcaaacctggggagtgcccgtaccttggtccattaagactggatgaatcaatcgtgccggttacgcggggaaatctgccatggggatggggaatggtccagaaggcctgagtgaacaatccgccacggaaggcggccggatggaaaataaggttcgccgggatagctccttgtggtaacgtggacgcatggatgacgctggtgaaacggtccgtaatgcgctgcctccgcaatggctggaatgggcggtggaacttcagtttatggcccaggcggggataacgtatgcgaaagacccctatgatctggagcgtttccagcggttgagggaaatcgccgcggaaatcatgagcgccaaatccgggctggatatgggtacggtccgggggctgttttgcagtgagaccggatttcaaacgccgaaaatggatacccgcgcggctattttccgggaaggtaaaatattgctggtgaaagaaaaaggttccggcttgtggtccatgccgggcggctgggtggatgtgaaccagtccgtgcgggataacacgatcaaggaagtgcgggaagaagccggactggaagtggaagcggtacggctgatagccctgcatgaccgcaacaggcacaaccctcccccctatgcgtacggggtttgcaaggtctttgtattatgtgaagaaaagggcggctccttccagcccaatctggaaacgtctgaaagccgctggttcggacgggatgaactgcctcccatggctttggaaaagaacacgccggaacaggcgctgctgtgctttgatgcggcggacgatccctgctggaatcccgtgtttgattaaaaaagggaacatatacggcaaaatcattgactctttccgggaaagtgctatgccagtcccagcggcttgcgaaaagcgggctgttttattccggctgtaacgttcccttcttctagcggtcaggaaggccgtctctccaacggcaaaggctcggttcaactccggcagggaatgccatccgccctatggcatcataggaaccggttttttgtcttgatgcctgttgccggcaattcattgtccgtgaagatgtgcgctttttggcgcatgccccaggcgcatttcttcggaatgcctccttttccgaaagaattttccagccctcggaaattcaggtttctttttccttaattttcctgttttttcattgcggtcctcttcaattgcggcattttgaacccggaatattctggttgttcctgtgagcgtggaaagcggtttcatttttcaggaatggcggcgtttttcgcttttccattttgttgttgttgcattcatgaaaagtgcggatttcaaatccgtcgtcaatgacgaattaatattttttcatgcggatcagatacttgtggttgaatatataaatggcagcgcttccgcaaggcggcgtgaaaggaaattttagaatcatgcaagttatttatcatcattgatgatgagcgtttttctccggaaagtcagatgccggatttgaaatccggtagtttgcgcgcggagccatgtataagttttttggaaaacgcgtattggatattgccatatccttatggacattgataatcgtatcgcctcttctggccgttatatccataatactcctggttcatacgcggaagtctccgttttttttccagacgcgtgtggggtaccgcgggaaattgttcagggtttttaaattcaagaccctgacggatgcccgtgattcggaggggctcctgcttccggatgacttgaggtcttttccgctgggaacttttttacgccgctattccctggatgaactgccccagctggtcaacattatcaagggagacatgtccattgtaggcccccggccatggattccggatcagctggatgtttttcccggccgctgccgcatggcgcgctgttccgtccggcccggattgaccggcatggcccaggtatacggaaggaacggaatcccgttctacaggcggttgtgctacgacatcgtttacgcccggaatgtgtccctgttcatggacgccaggatcgttttccaaaccgttgtccggttgctggcccataaggacgtccggcagtgcgaggacgctttcaggaatatctcgggcagcatgctcatcaggaacgatctttccgtgcctatgccttttccgtccaagcaggaagaatcctgattatttatccatttaaaaccataaccttataccttaatgatgataaaccgcccctctcttttttctcccggaattttccggctggcctccctggctgtctgctccctgctgctggcctcctgcgtcaatccgaaagaggttctctatatccaggacattacgggtgagacccggcaggatatagtcaccaaataccagacgactattcaaaaagacgatcagctttatatttccgtcagcagcaagcagccggaactgactacccccttcatcatggcggaaatgggcaattccatctccaacaacaccggcaattcgcggcccaaagggtacctggtggacgacgagggatatattgtcctgccggtcatcgggaagatgaaggccgcccggaagacgtgttcccagcttgcccacgacatttccgcaaagctccgcaacagtgattacatcaaggatgcttccgtcaatgtccagatcatgaacttcaaattttccgttctgggagaggtgaataatcccggctcctaccaggtggacggtcagcgcgtcaccatttttgacgccatcagccgggcgggagatttgaatatcgacggcaaccgggacatcgtgctgatccgggaaatggagcgtgaccggaagatcgtcaagctggacctgcgcagcaagtccattttctcctctccttattactatatccggcagaatgatattatttatgtcactccgtcagaccgcaagatcaacatgaggagcgaaagcgcccagtattacgcctggggcctttcgggcctgtccctgcttatcgccgtcatcgccatcagcctgtaagacgcttcatcctgttttccttccatgcccgtttcagtgatacagcctgaggacaacgatattttttccttccggttcattttttccacggccaggaggtattggccctggattctggcgtgcgccctgctgggcgcggggctggcttatttcatctgcgcccggcaggggtatctgtaccagaagaccgcccgcatcatgctgagggatgacaagcagaagaatgcccaggtctcggaaatcattctttccgatctggggttcaagccgggggaggccaacctggcgaacgagagctatgtggtcaagtcctcggaggtgatgagccgtgtggtgaaggggctggggctcgacgtctcctactgggaaaagcggaatatccgggaagtggatctttaccatacgactcccctgaaggcggagttcagtgaagaggtggcgtttcagccttgttccctggcggttactccgctgaatggccgggaattttccctgtcttaccgggcgaaggagagcggggaaaacgttctgcacggaaagttcggcgttccgctgaagcttcccttcgccacggtgaatgtatgccctacttcttatttttcttcaggcagcatgggaaggaccattttcgtggagcgcgtttccgtgaaggaggccaccgacggaatgctgggccggctgagcgtaacgcggcccgattccaaggaaagcagcctgctggagctgacgttgaggctttcccatccgcaaaaggcggaagacgccctgaattatcttattgaggtttacaatgaccattccaggcgggagaagcaaatggccgcctcgcgggcggaggagttcatcgtcaagcgcattggaaagcttggcggccagctcggcggcgtggacaagcaggtgattgactacaagcgcaacagccggatcgtcaaggatatggatacgacgctggatgccacgttcaacagggtgcaggaaatagggacggaacttttctccaccaggacggagttgatccaggtgaaggtgctcgccaggctgctggcggaccggagccgccagcaggacatgatccccgccaatataggcattcaggatgcgggaattgccaagcagatcgaacttttcaatgacaatttcctccagcataaaaagttgttcgccagcgcgggaaggcagaatcccatggtttcctcgctggcggagaacatgaaggagatgcgcgaatccattggccgttccatcgccaattactgcaacgcgctggaagtgaggatgggtgaactggaaaaggagcggaatgaactcaaccggcttttgtcggacatggcctccaaggatgaaggcctggtccctcttctccgggagcagaaggtcatggaggaactttacctgatgctgctgaaaaagagggaggaaaacgccctggctctggccacgacggaaccaagcgcccgcattctggaacctgcgttcggctccaatgctcccgtagcgcccaaactgtccctgatgacgatgggcggcatggccggaggcgcctttgcaagccttttggtcctgctggccgggaacgccctgaatacgaaggtgcgggataagaaggaccttgccggagtgacggacctgccgctggcaggggaactgcccctgctttccggaaaggagcggaaaaagctgcccctggtcgtcacgaatggccgttccttcatggaagaatgctttcacatcctccgcaacaatgcggaacttatgctgctgcccaatccggaggaagcgccccgcgtcctgttcctgacgtccacgagggcgggggaagggaagacgtttacggccctgaacctggccgccgcgtatgcccagaccgggaaaaaagtccttctcattgatggagacctccgcaaggccagtctttccgccttttacggagggaagaataccaggggccttgtgcacctgctgatgaatccgcaggcctctccggattccgtcctgcaatccggcaaaaggttcccgggatttgacctggtgacggcaggtcccgttccccccaatcccgtcgcgctgctgacccggggccgtttggaagaactgctccggtactggcgcgcccggtatgaccgcatcattctggacggctgcccgtatgaggccgtggcggatgcctccctcatggcgcgccatgcggacctggtcctttatgtcatcagatgcggcatgatcgagaagcagtacgtccccgccatccaggggctggcggacaagggcgaattccgttccggagctattatcctcaatgcggagaatttcaaaaactcccgttttcattactacaacgaatattccgaaactgacggatagcgtcgttaactgtcctctgcgttgatcactcccttttcttcagcattagccccatagcctttttcccggtattttcttcttccaccgtttcatgaacaccgtctccagagtgataaggaacacaggattcctgtatatgaaaatgggcgtcaccatgttcgtttccctgtacgcgacgcgcctggtcctgaatgccctgggagtggacgacttcggcattttcaacatggtggcgggcgtgattgccatgctggcttttctcaacgccagcatggcggcggctacccagcgcttcatgagctacgcggagggggaaggggacccggagaagcagaaaatcgtgtttaatatcagcgtggtgctccatcttgccattgccgtgatggtcggaatcctgctgtacgctgcggcccccatcctgttcgggcatgttctcaatattccggaggaccgggtttttgccgccaggtgcgtttactgggccatgatcgccagcaccgtgttcggcattctgggcgttccctgtgaagccatgctgaacgcccatgaaaatatgctgtatttcgccgtcataggcgttctggaatctttcctgaagctgggggcggccctgcttgtcgttcatgtgctggcggacaagctggttctgtacggggtgttgatggccgggatttccatccttgccatgacggctatgcttgtttattgccgcaggaactatgcggagtgcgtgattgcgccgcggcgttactggaaacgcggcgttttccgggaaatgggcagctttgcggggtggaatttcacggtttccgccagcagcatgctgtcggaatacggcgtcggcatcgtcctgaaccactttttcggcgttgccctcaatgcggcgcaggccgtcgcccagcagatcaacgggcaaaccatggctttttccgggaccatgctgaaggccctgaatccggtcatttcaaaaagcgagggggcgggcaaccgcggcctcatgctgcgggcctccctgtccggctgcaaattcgcctacctgctcatggcggttttcgccattcccctgattctggaggctccgggactcctgggcctctggcttcattccgtccccgcctgggcggtcctgttctgcaggctccagcttgccagaaccttgctggaacagcttttcctcagcctggggtccgccatttacgcggaggggaacatccgcctgtacacgctggtgaaaacgggttccgggattcttttcctgggcgctacctggggattctatcgcatgggatcgcctccctgcatgatgtatgtggccgccattctcttcgtcaccgtgccgggggggctgctggccctttccatctgcgtacggcgccttggcctcagcctgcgggatttttctttccaggtgctggcgccgtgccttgtccccagcgcggctacgtttgccgcgggcatcctcctgtcccggattgatgcgtcgctttctcccgttccggtattgttccgcacctgctcgctcctggtcgtcttcctccttttcctctggtttttttctctggacggcagggagcgcggcacccttgtttttttcctgaaaagcgcctggaggaaaattcagttttccaaataattccatgaaatcctattccattctcgtcaatacctgtgattcctttgaagactgctgggagccttttttcaggctttggtccctctattggcccgattgccccgcccgcgtctacctgaatacggagtacaagacctattccggtccggaaaaaaacgtcgtttccctgaggagctgcgcaggccgcaccattccggggcgcgggagggccacgtggagcgaatgcctgaaatgggccctggaggccatggaaacggatacggtgctttacatgcaggaggattacttcctgacggcgccggtggacggcggggcggtggaaaggtatgcggagcagatgcgcgcccatccggaaattccctgcatccagttgacgccggagggaattccggcccgcgagccttcgcggtatgaaggccttttcaccagtgacccggattatccctggtacgcgtgctgccagggctccctgtggcgcagggaggcgctgctttccctgttgaggaaggaagaatccgcctggaagttcgaatgcttcggcagccggagggcgaagtattcccgcatggagtttttgacggtggacccctccctgttttcccgggaggggtaccagatcattccctacattttcacgggcatcatccacggcaaatggtacgggccggtggcggagctgtttgaacggcacggcatctccatggatttttccaggaggggtttttttgatccggaggaaaagcccccttgctccgcgagaatcaggaatgccgccaggaactggaagacgtggcgcagccggctggagctccggtccatgaagcgccgcttccttcgggaggagaatgcctgcggaggtaattaaacttgtccatgccatgatttcactgacgcaccagggtttgcatttgctgcgccgcatgtttgaccgctgttccggcagggagaaactgaaccccccttcctgtgaactggacgcggacgcggcttccgcgatgattgaggaccttctccgctccggccgtcccgccatggtggggcggtttggctgcacggaaatgtcctgcctgcataattatctggaaattgggaaggcgggcaggaatccgctggactacatcacaggccggagggaccagtggtggtggaataaaagcatcatgaggcagatgagggagtggtccggctttttcccggccgcgccggagtatctggcccgtttctgcgagctgatgctctgcgacatgaaggaactggatatcctgggaagctggcttccatatgaacgggaggtgatgcccatgatccgggacgttccccgcgtgcgcctgctgaatctggagccttactggtcttcccggccatggagcagggccctggagggaaggaaggtgctggtggtccatcctttcgcggaaagcatcacgctccaatatgaacggaacagggaaaggatttttgaaaacccggaggtccttccttccttttccctggagacgctggccgccgtccagagcctgggcgcggggccggaccgttttgccgactggtttgaagccctggcgtggatggagggggagatggaccgccgggattacgatgtctgcctcatcggatgcggggcttacggctttcatctggcggcccatgccaagaggaggggcaggcaggccgtgcatctcggcggggctcttcaactgctgttcggcctgcggggcaggcgctgggaagacccggcctacggggcggatcccggcgctcccaaatatgattattcccggcttttcaatgacgcgtgggctaggccggggagagaggagacggtaggccacgccagccgtgtggagggggggtgctactggtgaagaacatgaaccctccggaaaaaaggatgaacgtgctctggctgtccaatatcctgtttcccgaaccgtgccggatgcttgggcttccggaaccggttctgggaggctggatgtacgcgggagcgcaggagctgatgaaagccgccccggatttaaagctggccgccgtcatgttttatccggggcgcaccctgcgccgcctggacggggaggccatgacctattacctggttcccgcccctgcggacatgggggggtacaggaaggaactggaaccctgtttccgggaaatcagggacatgttcggcccggacgtggtccatatccacggttccgaatatccgcactccctggcctgggtgcaggcttgcggggcggaacgcacggccgtttccatccaggggctgtcttccgtctgcgccgggttctatctgggcggcattcctatccgggaactcgtgaaatccgttaccttccgcgatctgctgcgccgcgacacgctttttgcccagcagcggaaaatcaaggcgcgcggaaaatacgaacgggagctgttcggcagggtgcgccatgtgatcgggcgtaccgcctgggaccgttcccacgcatgggccatgaaccccgcggcacggtaccatgttctccagcccacgctcagggaacccttttaccgtcatgaatgggatgccggaacatgcgaaaagcatacggtttttctcagccagtcccactaccccctgaaagggctgcacaaagtggtggaggctcttcccctggtcctgcggcattatcctgacgccagggtgaaggtggccggaccggacatcctgtcagtccctgcgtggcgcaggaacggctacgcccgttatttgggaaacctgatggaacggctgggagtccgggaccgttttcgttggctgggacgcctggacgcggaacagatgggcagccaattccggaaggcgcatgtcttcgtttgcccctccatgattgaaaatgagtccaattcactgggggaagcccagatggtgggcactccctgcatcgcgtcctatgccggggggatgatggattccgtgtccgacggggaaacgggtttcctgtaccggtttgaagagacggaaatgctggccatgctggtgtgccgcctgttcggggacatggatttgtgcaggcgtctttccttccgcggaaggcaggcctctctggagcgccatgaccgttccgcgaatgcggaacaactgaagcgcatctacggcagcatcgccggagaggccgggaacgggacggaggaacatgaaggaaagggaagggagggggccgcatgcagcaattgatttatcttgccaggaaagccgtgctccgctgctgggccgtctgcctgcatcccctccacaattggtatgccaggtggctcctgtatgccggcaacgcggtttacggccccggcctctgttcgttcggcattccggacgtcaggatatccaggggaagccgccgccgatccgtgccgtgccgcataggaagggaatttaccatgcggaacggctcccacggcgtctcccgttcctcccagcgctgcctgatttccgtggaccgggacggcgtgctgcgcatcggcaaccgggtgggcatcagcaataccgtgattatctgcacgcagtcggtgacgatcggagacgatgtaaaggccggattcggagtccacatcatggatacggatttccacgcgttggacccggaagccaggcggggagcggaggacaggcttctgcgccggtccgctcccgtcaggattgggaacaacgtcttcctgggtgccggaaccttcattttgaaaggcgtttccatcggggacaacgccgtcgtgggagcacgttccgtggtaacgcgttccatcccttccaatgaggtgtgggcgggaaatccggcgcgccgcatccgccgggcggaggaggggaaagctccccaggtgatggaaaggagcgcgcatgcgtaatacggccctttcatgtcaggcgaatggaaggccgccccttgatgggaaatcccgccttccttcaagcatccgggtcgtgctccccttcatcatcctggtgaaggccatgatcatgctggccatgtactcgtccgccgccgtccttcacccggtttgtacggaacaggccatttccctttcctccgccctcctgctgtcggtgtccttcgtcatcatgcggaagtatttccggagggaggacgcccccgtttatcccctcttttccatttatttcctgtgggtattcatttgctgcctgcggggcgtcttcgccgtggacggctactggtccgcgcgggccctggtgacgaatgcccccacgcttttcatccccgtgctggtttacgtgttcagcctgccggaggtgacgcggcaggtcctgtccgtctggttcaaggtgttcatccccgtttttttcctgttcatgttcaccctcaatccggacttttacgcctccctgctgaatcccctgctgatgctggtgccgtggctgcccctgctgccccggaaatggaagctggtggtgctggtcatggcatgcctgatggtgtgcgtcagcatgggagccaggagccagattttaaaggcgctggtggctctgtccctgctggccgtctattgcggcagggatttgctcaaggactgcttttacaggatgatgcggcacgccctgtttttaattccctccctctttctcgccctcgggctgggcggcgtcttcaatgtcctggatgtcggctcctacgccggagcgccgggaaattccgtggaggacgacctgctggcggattcccgcagcatcgtctttgaagaggtggcttcttcctccctgaaggacggctgcattttgctggggcgcaccccggcgcaggggtatgaaaccagtttccagatgtccagtgatgagcgccagtcctaccatgaccagaagcgccgcgcctggtgcgaacccgtcctcctcaatattttcgcctggacgggggtggttgggctcttcctttacacgggattttactggcaggcctcctatctggccatttaccgctccaacaaccgctggatgaaattgctgggagtgttcgtggccttccgctggctctggggatggctggaggataccaacttcaatctggatatcatgaacatctccctgtggatgatgatcgccatgtgctattccagccgcttccgggccatgacggacggcgagcttcacgaatgggtggaaagcatcttccgccgccgttcctccaaccctctcccctccatacgcattccatgaaaactgatgatacctccggaaaaaaacttgcggtcctgatgacgtgccacaaccgcagggaaaaaacgttccgctcccttgccgccctgttctccgcactgccggaagcggagctggacgcctccgtgcatttggtggatgacggttcctccgacggcaccggagacgccgtgcggcaggcttacccctccgtttccgtcatcacgggggacggaactctgttctggaaccggggaatgaggacggcatgggaggacgccctgaagaaggatgcggatttctacctgtggctgaatgatgataccgtgcttcatccgtttgccgtaagccatctattggaagcctccctccggatggaacacgccgccgtcatctgcggctccacctgccatcccggcacggatgagtggacttatggaggcacggcgggcgggaagcccgttattccggatggaaccctgagggagtgcgaattatgccacgggaacattctgtgggtgccgcggcgggtggtggagcgcataggcattctggacgggttctacctgcacgcgctgggggattacgactattcccgtacggcgcgcgaacgcggaataaagctgcgggtggcccccgcctgcctgggaacctgcgaacggcatgacaaggccgtagcctggacggaccggaaggtgcccctggcaggcaggctccgcaatttgtattccccgctggggaatgcccagcccaggtattacttccactacgtccgcaggcacgacggcctgctggccgcgtgcaaggccatgatctgcatgcatgtacgagtttttctccccttcttatggacagcaacgaaatagactgggtgttccagacggatgacgaagaggtgctggagacgtacaggacccgtgacaattacctcatggagcgcactccggagggggatgattcgcggtgcgccgtttatttcagcagcaacgacctgtactttcccaacaaccgcgcccggttccatgaacgggtcaccctgcggaatacgtttgaatggttcggaaccagggttccgggctgcggaaggcacatcttcatccgggacgttttcaagcaatggtacctgggcggcatcaacagccgcctgaattctccggaaaaggtgctgaagtggcttgaaaacgagacgaaaggctgccgggtaacgatggtgggcagttcctcgggaggctatgccgccgttctcttcggctccctgctgcatgcggaacgcgttttctccttcaacggctattttgaccttgcgccggaaacggaaatggaagacgccgccagaatcaatcccctgctggtacggtacgggaacgacccggaacgggcgcctttttaccgcctggccccttttctgcatgcggagacccccgtttattatttccactccctgttttctcccattgaccgcaggcaaagggagcttctgggcggctgccggggagtgcacgtcatcccctttcattcccgccgccacggaatccccttcctcaaatgctgtttaagccgcctttttcggagtaccgatgaggagctgctggagctgtgcggctcaattcaacggcccttgcggttttccctgcggtatgcgggcgtccggaagacggtttccggcttcttcaggcaagcgtggcaatattacaggaaaaggcactgaatcatgaacggcaacaaacggaaactgatggtctttcatcaatacctggcgccttaccgcattgattttttcaatgcgctggcccggattggagagatggaggtgtttttcgaatatgaaaattctccggaccaccactacaacaggccggaaatggaagcccgctgcgcgttccgcccccaatacctgaaccatgtccgcgtggccgggcggcgcgttccctccggccttgcgcgcattctgcggcagggacagcccgatctggtgatcgttccggagttttccattctggctctggaggtatgcctgctgcgcgcggtctgccgctggaaattcaaaatcgtcagcatttgcgatgacagcatggacatgatccgcggaaatgaattgtcccgcatgcatgcgctggcgcggaaggcggcgatgccggtgatggacgatgtgattctcccggacagggaggcatgccgctggtaccgggaacattatggaaagggcgtcttttttccgattgtcagggatgaacgggcattccgggaacaatgccgggaagcgctttccatgagccattccatgcagcgggaatacggcctgcacggaaaacgggtggtcctgtatgtggggcgcctggccccggagaagaatctggaatgcctggtcagggcggccgcggcccttccggaggacgccgttctggtaatagcggggtcgggaagcctgggaccggaattgcaggatttggccgtccggctgaaagtcagcgccatttttaccggctggctggaaggcgagcgcctggcggcctggtacaatctggccgacgtttttgtcctgcccagcctggtggaaccgtttggggcggttgtcaatgatgcgctggccgccgggtgcttctgcctggtttccgggcgctgcggctccgcctgcctgatccgccggggctggaacggggaattgttcgatccggaagatgaaaaggggctggcctctcttctccggaaaacctgcctggaccgcggcggcagtccgtcccctccgcgcctgaaagaatgcctgatgcctgcgggattccgggaatacgtcaaccatctcatggaacatattgtatgatgaatgcttccgccaatgccgccccgggcaggtcccggcccatcctgtttctgcgttccctggctaacggagtgcgcagtttcatacggttccgcctgcttcaacgctgggtcaccgtggagggaatgaccaggataggaaggcatgtgcatctgaattcccctcacaaacggatcattttcgggaacagggtgcaattggggccacactgccatgtctcctgcgatatacgctttggaaacagcgtgttgtgcgccgcccgcgtttcattcatcggaaaaagggaccattcctttaacaggcccggttgcgccatctgggattctccccggaattgggaggacggcatgacggtcatcggcagcgacgtgtggattgggcacggcgccgtcatcctgggaggcgtttgcgtaggggacggggccattgtagcggcaggcgccgtcgtgaccggagacgtgccgcccatgaccgtggtgggcggcaatcctgcccgggtcatccgccgccgctttgccgccccggaagaggaggaaaggcaccggaactaccttaattccatcaaatagacaagccatgatgcaaatcctgattaacgcttatgccgtcaacccggactggggcagcgaacccggcatggggtggaactgggtcatccacctggccatgcactgcaaggtgcatgtgattacggagggggaatggagggaaaacatagaacgggagctcgcccgccttccccaggccggcaacatcgtgttccattatcttcccgtaccggaaaaaattcgccggatgtgctgggaccagggggactggcgtttttaccgccattacaaaaaatggcaggaacgggcgcttgcgctggcgcggcgcatcatggcggaaaaccgcatagacgtcattcaccagttgaacatgataggcttccgggagccggggatgctgtggaaaatcgggggaatttcctacatatggggaccggtggggggaatggaaaatacgccggtggcctacttgcgggaaagcggctgggggcaggtggggaagacggcattgaaaaacgtgatcaataccgtgcaggccaggttccagcccagggtgcggaaagccatgaagcgcgctgacgccgtgctggcttccgttcagggagtgcgggagaaaatggaacggtaccatcgccgggaagcgctgctgatgagcgaaaccggctgcgccgcgccgaaggagaaagtgcggagggcaacggacggcggacaattcaggctgctgtgggcaggccgcatgatacccagcaagcagttggccctggcattacaaaccctcacccatctccgggatttgccggagctgaagctgcatatctgcgggggaggggagagggggcggggctaccggaaccttgcggaacggctgggcgtggcggggcaatgcgtgtggcacggcacagtctccaatgaaaaggttcaatcactcatgcgggaaagcgacctctttttctttaccagcatcatggaagcaacctcaaccgtgcttgtggaagccctgatgaaccgcctgcccgtgctctgctttgatacctgcggcatgggaaccatcgtggatgaaaccgtgggatgcaagatacccctgacccgtcccggacggtccgcccgggactttgcggaacgcatccgtttctttttccatcacagggaggtcctgcgggatatggatgaagcgttttacgccaggcagagggaactggactggaaccgcaaggcggaaaggatggccggcatttaccgcgaagttttgaaggcccgtcaacattgaccatgagtgaaaaccgtatggagacctatttcaacatcagatacgaatttgaccgtgaacgcgttttccggcgcatggacgaagtgctccgttccgggggcgccggatacatctgcgtggcggacggccatgtactttccgaggtacagcgcaaccgggaatacaggaatgtgctgaatggagcgctcctgaccatttgcgacagcggctgggtgcccgtctacctgaaatggctgctgcatgcggacaggccccaatactgcggcgcccagattttcagcgacgccatcggcatgaaaaaatacagaatgatgttcctgggaggaaaccgcgagacgctggatgcccttcgccggaccctggaacgggaagatccccgcgtgaagcacatgccttttgaggaattgccgttctgccctgtggatgaatttgactacgcggctattgccgggagaatcaatgaatacctgccggacatcgtctgggtttccctgggcgctcccaagcaggaaatattcatgaacaggctgtgcccccatcttcaacggggggttatggtggccgtgggcgccgtctttaacttcgcctccgggcggcatatcagaagggcccctgcctggatggtggactgcaggctggaatttctctaccgcatttttaatgaaccccgcaagcaaatgaaacgctgctggaaaataatctctgtcctgccctggatttttatccgtgaaaaacaacggcaaaaggcggccaggccggctgccgcctccggaagggaaagaaaagcgccccctcttccctgtacgctggtttcatgtttcggccggcttcccggcaacatggatgacctgctggctgactggggcagggaagaaggcaggaaattcatcattgtcagcgacgatgcgaggttctggaacctgcccttcaacgccagcctggtgccgatggctttttgcgaactccagtccctggtaaggaaaaaactgggaagacggcatcaaattaacgttccggaggacctcccgctgcttctgccgcaatatccggttctctttgaggactatgtggaagggaaccgggaattggaaacaatagctctggaatgggaggccggttcctcccatgcaccggttcccgccgctccggtttaatgcttacccctctccatacagcaacatccacaccttaatacatttcaacgatggctaccaaaatattcgtctccggtttttacgacatcattcatgccgggcatatccagttcttccgtgaagcgcgttcgctgggggatttcctcatcgtctccttcgcctccgggcaggtgctctggaaaagcaagcgcagaaaaccatccatcccggacgaccataaaaaagtgattctggaaagcctgtgtatggtggacaaggtggtctgcggagaacatctggagccgggaatggattttgaacacgttttcctgaaagaacggcccgatatcctggctgttacggaagatgactgttacggcgaccttaaaagggaactgtgcgcaagaattggagcgcggtatgtggtgcttcccaaaacgcctccctgttccgaacagatttccaccacccagctggtgaacagaatcaaggccccgcttagcgttcccctgcgcgtggactttgcggggggctggctggacgttcccaggcatgcgcggcagggggcgtacattgtcaactgcgccatcagtccgtttgtatccctggaccactggccctatgaactccggtccggactgggaggcagcggagcctgggccatgctgcagggccgggaccccgtccagtcggaacttgccctgggggttggctggcaggatccggccgtgattgcggaaacggggctgtgcgtctggcgttccggcgccgttcccgtgctggacatcaagagcaccggtgactttctggccgggaaaatggcggtcttccacaccgggcatgaccatgatacgccgggaatggctgacgggtgcagggactatgcccgcatcgcccagtcttccctgattgcccgcgccggagtgatggagcgcagcattcatgaactggctgccggagtggcgctgtaccatagcgtgcagctccaggaggggatggccccccttccagcactgggggaggagctggcgaagaaatacctgggaggcgggttcggcggatatgccctgtacctgttcgcttcccaggaggacagggacggggcggtgcgtcttcatgacggcatgagggctgtggagccgtattgcaaaagccccttctgattcttttgccggaatgaaaatgtccatggttgaagaatactctccggacacggagccggaaaaggcgcaggctacccgtccgggggccgttcccgggacgccgccgagggaatgctggcttgacctgggcagggtggttggcctgttcttcatcgtcctttttcatgctgggggaagcggagcggaattccctctcttcttccagcgggtgccttttctgttcatggcggcggcctactttgtgggacgcaggaaaatgttcgactggcgtcattccccgtgcaggtacgttttattttatctggcatggaacggcgcggcttttctggaagcgttcttcaggcattggatttatttaagcctgggccattcaagcacgtgggactggagcagcctgccctggaaactgacgggagtgggaaccaccttcccctacgacggccccctgtggttcctgaaatacgtgatggcgctgagcctgctctcttcgcttttatttgccctgggaaaaaggaagctgctgattcccgcgacgatagccgttctcttctccgtagtgctgtttccggagatcaacgcgctgttttccgaccctccccgggttccgtgggcggactccctggcttttttcatgctggggttctgcctttcctccctgacgctgggcgagattaagctgttcctgaaaaaaataagttacttttcccttcccgcgtgggcggcaatagcgtggatgaaccatggcggcgtcatctccacggaaaccctgcacaccatcccctgctggattccggggattctgggactgggctccctgtgcgttctgctggcggaaaagacgttctttcgtaaaatcgctcaggcatgcgctcccctctttttcttcatttatgccgtccattgcctgatccttccctggttgatgccgctcctctcgagaatccttcctgaagaacttccttctcccatgattgcggcggtcctggtatttgcgggagcattctttcttcatcggcaggtggtccggcattaccccggctgggaatacctgatctttgcccaaaagcggagaaagccggtgactgacgggcaggaaaaggagatagttgccgccgccttttcccggtccgcttccatcaatgagccccctctttagaggtcttccgatttttctgtggcttatatgggaaaacggtttctccatgcttgagccgccattatcttttcagatgaacctctgttaacaacccttttcccatttctcctttgccgcgctcaatatcccttcttccaatggacaaaccttttctggcggcccgcttcatggcttcattcagagtggagtttttattcgaacggcaatttgagattccaattccgaagggcctccggcactcgtcaaacggcgtaatgatgcctgcacgttcccgggcaatctttgacggcaaccccgtgcggaaccgccgccgtctggatgccagaagacatgcccatttcagcccggatgatggaatggcccggagggagatgaaagaatattattgttaacagagtattatcaatatacggctaaaaaataccccttattgatttaaaaaaatgactgcctttattcaacttcgcgccctgttgctctgtggtttgctggggtacccggctgtcgcgtgtggaaaaggaaaggaaggcgtgtccgtcatggttccggaacaggcttcccgcggagagctggtggagatggcggtcaaggtaaggccctccggccggcaactggattaccagcagcgggaaatgctgggtttcatccatttcggcatgaacacgtttaccggagcggaatggggaaccggaaaggaggagcctgcaattttcaatccttcccggctggacgcccgttcctgggtaaaaacgttcaaggatgccggtgtaacgggagtgatctttgtagcgaagcatcatgacggattctgcatgtggcccaccaaatggacggatcacaacatttcccgttctccctacaagggaggaaaaggagacctggttcgggaagtttccgcggcctgccgggaactggacatgaaattctgcatctacctttccccgtgggacatgcatgaaaaaagctttgggacggaaaagtacaatgatttctacgtcaaacaactggaagagctgctgaccaattacggccctgtttatcttctatggtttgacggagccggggtggatagcaaagtcaatgggaaacagactcccttcgactgggagaggatctttaaaaaggccagggaattgcagccggacgttctgctttccggggcggctccagatgtccggtggggaggaaacgagatgggacgcggacgggaaacggaatggtgcgtccagggggttacggcctcgtcgcgcctgtttggcggaaatgatgtggggattcgggctaaagacaggaatctgggctccattgatagcctggcagggaaaaagcggctcgtctggtacccttcacgtgcaggcctccccatacggagaggctggttttaccatgaacgcgacgacaaaaccatcaaatctcttgattacctggtggactgttacttttcaaccgtgggacaaaactccaacgttcttcccaacctctctcccaataaggaaggaatcattccggaggcggatgccaggaggatgatccaatttggcagggtgattggaaagatgaaaaaaaatgacttggccaggggagcccgggcgaaagctctttccgggtgggccggaaatccggaatccgggcttttgtttgacggcagcccctttacaggctgggccactcctgatggcaccacccgggcggaggtagaaatccgattgtctggaaaacaggagttcaacgtcatcaagctacaggaaaatgttcgtgattacggccagcgtgtggagcgctttgccgtggatgcgtggctggacggccagtggaaacccttggctgaaagtaccaccatcggattccgtaaaatgatcaggctgccgaaggcggtgaaggctgatcaattgaggatacgcttcctggattcccgcaaatccatttcattcagcaatttctcgttgtattacctggctcctttctcaacggaggacaacgtggaaggcgtccggaaactgaacaggaaggaatggaaaataaccgttgccgggaaaaaccttcccgcggcccagttggagcggctgaaagacgggaaaacggatacttatgtggaagtgggactgcctccccagggatgcgacattgttattgatacgggaaaagtgcagaaaattgccgggttgatatatacgcctgtgatggagggagggccgggccatattgaaatgtatgatatccgcctcagcagggatggcaaaacatggggaaagccggtggcttccggccgtttcggcaatatcgtcaacaacccggtggaacaggaggtcaattttgttcccgttgaagctagattcgtcaaattcagcgctaaaaagggtgccgacggagcacgtaaagcggctgttgccgagttggatttgctttaatatggcctataagggcctttctacgaggaaaaagagggaaagggaaaccaggcaaatggaaatttggttcttgctccggtgtgcttcaacaggaagaaggatgctaggtttctccatgaagcaaccaggcggcccatgtaaaaaggaagcgccccaaatgtttttccgcttaccatgcttgcattaacggctaacatatccgccggctctgcaatcgtggcgcgtgggaggtaggggcagggacacttcaacttctataggaagattatcctgacggccgtattcccggacaggaacggcttcgttcagtctcgacgcttttcacaggatgatattttccaggaacaggtagaaactttcaacgaagtggtagcacacgttgccgttttatccgatgaatggaaggagcttcacgtccgagtgcggctggatcagatcatcagctcgcctttggaggaaagggaaatatctctggaatccagggatgcggttgctctgaccgtggaagcagccaccgcccaggaagggagcgggtttttcaccagccagaatttcggagttcacgatggtggacgggatggcagtggcgttgttcagccacttcgcaacaaacaacaagaaataatcatgaataaaattacttctatcaacggaaccctcatagcttctctgaatgaactgaatgaacatgtggagaatggaactgcccatgttacagaggaagagcgtactgcatggaataatcaaaccacggtcaaggccaaggggattctcattgccacccaggaagaccttgacgagcataccgggaacaaggccatccatgtgacggaagacgaacgcgccgcgtggaacgccaaggcggatgctgccgctctttctgcaaaagccgacgcgtcttccttcaatgtgcacaaggatgatgccgtagtccacataacagcgaaagaacgtgaaacgtggaacggcaagcaggacaaactgacagatgaagcgggcaatatgacgctggacggaggactaacggctcagggcggaacattttccgatgcggttaatgctaacggaggcatcaacatcccgcttgccgcgggagccgtgactaatactgcggccgtcaaccggatatatgctgccgggcttgccgccgtggccgagacatacaacctgcagatttaccttgatgccgcgattactaccaccaccaataatgctgccgtgacggagcgggtgtcggggcagctcatgagggttaccgtgccggccagacagtcgtcatctgtcaatatgggcctggatcactctcttataggccgcgccaattacagcaaatttggcggatttaccctgccagtccggatgtcagcctataaagccactatcaagataacgctaggcatgggtgacggacaggtgtcggtgaggacggatagagacgttgacgattacactagggtgcacactagcgctgagcactttggcgaggtgctggatgtgactatatctgacacaagagattctgagtccagagggtactgggtcagagtcagagagatttattactcccgttcagcggggaggaagtttgtcaagactacgagggcattattaccccttgacggcaacacagccgtgcccgcatccatcagcgggctggtgtatcaccagtaccgtgacggtggctgggatactgacaattatgggacgttgtggctaatgacaggcggctacgataatcgctgctgcatacgcatcgccaatgtgcggggcatacatacctacaactcggtaggatttaacgcatgccacctggacatctacaacagtacaaacgccacaactgtggacataggcgctccgcgcattatgcagcgatacatggacggttataaccctgcgtattatggattttcggccatcgagtataacgcgatcaagtccgagacgatagaggattttattgatccggatactcaagatcaagcctgataccatgattgcagatagatagttacagctacagtttccatgtctcggagagtgggacaagttcacgatgacagccgtgtaccgggacgcggacggctacactcacactaaccgttacgcccaggacaacattctcaccgaagccctctcccgcccaccgcaggagagggcttctttatacccgcagtgcacggcaatttcccgcagtacattgtttccaaaatgatttacagtgtactactgtttgtactgaagttttggataaataaaaatcgcaagtactgtatttcaagcacttgcgattaaaataaatggtggaggcgacgggagtcgaacccgtgtcctgaaggccgttgatgccggcatctccatgttcagacgcatattgctgctttcgcggccgcttcgtcatgcgccaactaggcaggctcgctagttgcctgtggaagtctcgtgcgttgcgcggcaaccccgcattgcaccagcctgctgaatgttcgtcgtcccctctagcaggcgttgaggttctgacgcggctgaactaattaggcagccagagcaaggtcgttagactctgcatttatttttttaatcggctttttagaaggccagccgattaaccttcacatgcagccagcacctcagacttccagtcgaaaccatggcgcccccatatgtatttaccggtagagacaaaaaatcccgccatggcgttcaggcaggaattattttatttaccggtggtgatgcaagtggcacgcccgtagggattcgaaccccaaaccttctgatccgtagtcagacgctctatccaattgagctacgggcgctttgacttgcgtcgtgtaccgcgtaagcggtgagaggaatataggtttttcttcgggaaagtcaagatgtttgtaagatgatttgagaaaaaaatctcattttttctcttcccgggagaggagtccttcaaagacaggccgttgattccggagcgcagaaagaggggaaaggcgttgcgtcacggaatgggctgtggcacactgaacggagaaaatgagcgagttcaaggtgatcaggtcgccgatggaggcattgaaggagtacttcggcttttccagtttgagggagggacaggaccgcgtggtggcttccatcatggaaggccgcaacgtgctggtggtgatgcccaccgggggagggaaatccctgtgctaccagcttcccgccttgtgccgggacggggtctgcctggtggtcagcccgttgatcgccctgatgaaagaccaggtggacgcccttgccgccagagggattcccgccaccatgatcaacagctccctgagctttcctgaacaaagggaacgcctggccggcatgaaggacggggcgttcaagctggtgtatgtggctccggagcgtttcggccatgaggggttcatgcgtgctctggcggaggtggacgtgaatatggttgccgtggatgaggctcactgcctgagccagtgggggcatgatttccgtccggattatttgaagctgggcagggctattgaagcgatggggcgcccgcaggtagcggctctgaccgccacggccactccccgcgtgcgggaggatattctggaacatttgaggctggacgacccggtgacgattgtacgggggtttgcgcgggaaaacctgcatttccgcattacggcttgcgatacgcacaaggacaagtacaagaggctgtacgagctggtgaagcgccataagacgggtattatgtattgctccacccgcaaaaaggtggagcaggtccatgaggctctttccgaacttggcctgaacgtgacggcttaccacgcgggcatgacggatgagcagcgggaagaggctcagaacgccttcatgaaccgccatgcggacatcgtcattgccacgaatgcgtttggcatgggcattgaccgtgccgacgtcaggtttgtggcccattttgaggttcccggcagtgtggaggcctattaccaggaagctggccgtgccggccgcgacggggatgaagcctattgcgagcttttgttcaaccacgcggatttgcggacccaggagttttttattgagggggtgaatccgggcgttccgctgattgtggaactgtacgagttgttaaggaagcattgcagtgcggaaacccacgatgtggcgtggtccatggaggagatgggggaacgcctcaaatgccggaatgccatgcaggtgggggccgccctgtccgttctcatgcgcaatggcgcgatcagccgccatgacgttccggggcagcgcgtgaagcttaccagagtgacggaccccgccgtaagcggcttgaagattcctctggacgaacaggccctgcgggaaaaagaggtaagggaccgggaaaaactgaaggcggtaacggagttcgcttattccaccggctgccgccagcagtggattttgaattacttcggggaggaggatggcgccccgtgcggccgctgcgaccagtgcctgacgctgggggtggaggaaggccaatcgttgggcgaggaggaaaccagggttgtccggcaggcgctgagcgggattgcgcgcgcgtccgtgcgcatggcggacggttcctggcagggaaggtggggcaggacgaaaatcatccagatgctcaagggggcgaagaatcaggaaattttaaaaacttccctggcccggctgagtacgtatggcatcctttcccggtggagcgaggacgacatccgccagctgttccgcgccatgcagatggcgggcctgaccaaaatgagcggagaagcggaccgccccctgattaccctgagcccgaaaggtaatgaagtgatgatggggcggaaggaggcctccatgatttggcctcttgcccgcagaggaaaagcttctgccccctcgggacagactagggtgcgctccacgggggatttggccgccctgggcgagtttgacgaagatttgtttttgaaattgaaggagctcaggaatgagctggcccgtgaagccggaattccggcttatgccgtattccacaattccaccctggaagggttggccaggctgaaacccaccacccgccggggagccatgaacgtccacggcatcggggagcagaaggccgcgaagtatctggatgattttctggaagtgatcgcagagcattgcgaggtttaaaaaggttttccggaccgcttgcaccatgtccgcgccgccgtgggggaactgatggcccttgttttcccatggtccggccgctgaatgttcctgcggggttatatttgcaggtgaaaaacggcttccggttgattttatgttgggaggacgtttgtccgtctcttgaatccggacgggaaattccagtgggaggtggcgctgaaacccggtgaagaaaaggaactgacctgccaatatgcctgcctggagtaattcctgcctgtactatttatgtattgacttcattttgggaagtgtgtagtttcttttccacacattacccaagacggagcggtggctgagaggctgaaagcactcctttgctaaaggaacgtactggcaaaaccggtaccgagggttcgaatccctcccgctccgccaaaacatttttcttcttaagagtctgtattttaacgatacaggctcttttttgcttttttggcaggtgttgcaagaagagagaaaggatcatttgccttttagtcaaatgcctggctgcactggtttagaaactggcaagggagagttgcatggagatacagttcagcaagctatctctgccggagttcttccagcgtatgaatggcaaggccggggaatgaggtgagcatgaaagaagcctgattgttctgaaattattaatgggggaggattaaaaaatggcgatgctgtccctttccattatttgctgcagcgaatatggttttttattgattgattttctctgtgaagcttttattaaaaatggataatgtatcctctttatgaaaaccattcttttttattgtgggcattttaccttgtcctctcttacgggagcggaacaccgttcctgtggtatgggacaagcggaaaaaacagggttgttccggatagccccattgcactttccatgcagggagaacggtgggaggaccctgtctccggatgctttggccagttttatgtttaaaaatcagggaaagattcctatttatcttcttgacttttttgacgtagggaaagaaaagcttttttctctgagagggatcatttgcaatgacgaggagaaaaagtgctgtattacatgccacgtctcaagattgagttgtgccatccactgaggtatgtggatttgctccttggcggcatttacgttgtatctttccctttgccaaagcttatcaaggatcgatatccggaaggacttccttaagggaaatccttcctaacgggggagtatgaaaatcaatttggccgtaattgctttaaagggaaaccagtttccttcccgccgggtttacggtaggggagtagtccgtggctttcatgaattcccatgctcgctcatcttggcacgaagcgggctcttaccggggttctctctcaggggggaaagagggtgcataccgtttcccgcacttcgtcaagtcatttggcacggatgtccggagtgctggctacaaggatgcagaacatttttctttcaaaaacatgcacgctgcagaaagcgaagatgcagtctttaaaagccggggctgtccccaccagttaggatggatgatgacaatgccgtcaacttccctggtttccggctgatggagagctgtccaggcgttttcccgggatgtcgctgaccagttccatgtccggccgaacggggttggagtgctcccggcagaggtcatgaaagcggatggtgtggccctgttccttgagtacatgtactgccgtggcggcaattgctgcattaaaactgtgcttgtaggaatgtcctaagatgacggatatttcatgtccgtttgtgaatgttctttgtgtgcttgcggcaatgcattgtttcggaaagagagaagttatttctttttcttaagaagccggtcatgtgcaaggcgatgctttcctttgtagagaaagtcagttttattgttcctgccgacggtgcgatcaatcaaattaggaatttcctctttggtatagccggcttgaagaaggaactcttcgactttggaatatttaccaggaaagatggaaacaagaatttccataaaagatttttccaggtctttagtttcgtcttcgattacttgatttctagagttaataaatgattcaccatcagcaacttcgttgagaagattccaaagctctgaaatttgttcttgagattcaatataaatagttttattttcttttaagtttttagattctccgtttgtttctttatattccgtgattctgtagggattatgttcttttgattctttgaattgttttaatatttttgcataataaggcaaaaatatatgatggataatctgttttttagaagattctttcatatcattcgaatccttaataagtcttatatatttatcgaggaatagacaaatctcggatttttgattgatatcggccatttcatcaatctcaacttccggttcggttttctgatatgttttaaaggaaaataacggagctgaggcgacaagataacaatgccatattttgtcgctcaattcagtattaatattattttgcgtcgttaaaccgaaggtaaatgtatgtttttcggcatttttataaaaggatttaaaatgctgatattctagcaaatccgaaagtttctggatagtggcagatggttgtttaaattgatctaagcaggcaggacttttcagagaagaatcagccataacaataggacacaacgaaatgagtagactaatgatagatatatacataaatgatagtactttcataaaatttcaccttcatcagagtttcttttaaattctaatccaaattttacaatagttatagttatagacatttttattgcttctatattgaatatttggtttgttttccctaatgaaatggtatctttattttcttcttttaaattaatatattttttacatatccaccagaaattttgtggattcactcccgacttgcgaattgcgttaaggttaactactgtatctcctgtctcagcaaccatgtcataaagattatttttatctcttattctaacaattttattaactccgtgtcctgtatgtgctgatgctagtaccggtttttttgaattattgtctctctcaggccattcaagacctccgtctcgctcaacagcgttaatttttttaaaacttacattagtgggcaataaggttaattcaatgaatcctatgagaccatactttcctttcgggaatttaatttttttggtatcaactttatcgttgccatcttctgtttcaatttctccactaaatttctttgcctctatctttgtaggaactttgatattaattgaaatctttgcttccttcccttcactggtttgggcaacaatttgaacgttcgtatcttttgttaatgatttttttgcaattagactaatcttttgtgatccttttaataagtcggcctttgtttcttcgaagccgtttcctttaatattccaagtaagttccttgatgtcgcctttaggttttccaacaagtaaaaatgtgattttttctccgataccgatatctgttctttttcgatcttcttccttatctaatcctttcttaatataataatctgctgaacataattgtgtttgagatttgatcttaagagaagcagaagcttcttgctccgtttcttcaagatcgtcattattatcgtttgctaataaattgttgcaactgtacagaattcctaaaaagcaaacaagatgagagagatatttcataaatatgctaaaatacgtattttaaattgaatcttttgtaaagaaaaatgatttaatttttaataatgatatttattataattattatataagtgaatttgtaatatggaaaatacataataggaatgtttctgtgcattactagaaagcttctcctgtttagatacctgaaagatgtctgtcttcttatatccaggtccaatcagcatcatgggattgatgccgtgtccttccaagaaaaagcgcctcctgaacaggaggcgctttaggatttgattgggagtgtgtaaatgagggcttacattcccttgtttttcatggcttccgccagggcggcgcccatctgggcgggcgtcttggccaccacgatgccggcttccttcagggcttcctgcttggcggcggcggtgcctttgcctccggccacgatggcgcctgcgtggcccatgcggcggcccttgggagccgtggctcctgcgatgaaggcggcgacgggctttttgcagttgttcttgatccattcagcggcttcttcctcttcggaaccgccgatttcaccgatcatgatgaaggcgtccgtgttggggtcttccgtgaagaattgaacggcctgctgctgggtcatgccgtggacggggtcgccgccgatgccgatgcacatgctctggcccaggcccatgttggtgacctgccagacggcttcataggtgagcgtgccggaacgggagacgatgccgattctgccgggcttgaagatgtaggccggcatgatgccgatcttgcagttggcggccgggttgacgatgccggggcagttcgggccgatgagggtcacgtctttatccttcaggaaggctttcaccttctgcatgtcctgcaccgggatgccttccgtgatgcagacgatgagcttcacgccagcgtcagcggcttccataatggcgtccgcggcgaagggcggcggcacaaagatcatggaggcgttgcagtccgtggcttttttggcttccgccacggtgtcgaagacggggaccttgccttcaaagagctggccgcccttgccgggggtcacgccggcgaccacgttggtgccgaagtccatgcagtttttggcgtggaacgcgccggcgctgccggtgatgccttgcacgaccaggcgggtgttcttgtcaatgagagatgtcattgtcgtaataaatagtgagggttatttgactgctgcgaccgctttctgggcagcttcgtccaggttgtcggcagggatgatggcgatgccgctgtctgcgaggattttcttgccgatttccacgttggtgccttccaggcggacgacgagcgggattttcatgtcaatgtttttcgccgcggccacaatgccctgggcgatgacgtcgcagcgcatgatgccgccgaagatgttgaccagaagtgccttcacattcttgtcgctggtgaggatgcggaacgcgttggttaccatttcctccgtggcggagccgcccacgtccaggaagttggcgggttccccgccgtagtatttgatgatgtccatcgtggccatggccagcccagcgccgtttaccatgcagccgatgttgccgtccaggccgatgtagttcaggtcatatttgccggcttccacttcacgggggtcttcttccgtttcatcccgcatttccatgatttccgggtggcggtacagggcgttgtcgtcaaagttgaatttggcgtccagggcgcacacgcggtcgtccgtggtgaccacgagggggttgatttccaccagggagcagtccagggcggtgaagagcttgtaaacgttggtgatgagcttggtggcctggcggagcagggggccggtcaggcccagggccacggcgatcttgagggcctggaagggcaggatgcccaaggccgggtcaatgtgttcgcggatgatggcttccggacgggtggcggctacttcttcaatgtccatgccgccttccgtgctggctacgatgacggggcattcacgggcgcggtcctggagaatggcgaagtagcattccttcttcaggtccacggcttccgccaccatgatcttgctgaccagcttgccggtttccccggtttgcttggtgaccagaacctggttgagcatcttgccggctacgtcttccacttcctccacggagtcaacgacgtgcacgccgcccttgaagccgtttttgaaggtgcctttgccacggccgccagcgtgtacctgtgccttaactacgtattgggagaggcccatgttccgggctatttgtgctgcttcctgggcggtagcggcggcaatgcccttgggggtagccacgccaaagcgctcaaagagttgttttgcttgatattcgtgaatgttcatgacagtgggccgttcggccaaatgtttgcgaaagaaaagctatgcctgttttttgtgccggtcaagggagaatggtttggtcttttgattttttgttcgggggattcatggagtgcctttggaaatcaaagaggacagaaggcttgactgcatgcttaaagattgtgaaacttccttctcatttttccgtattatatcttttatgaaaatttaccgtccttccgacacctgctttgacgaaatgaagagccggatgaaccgccgcgctctcccggaggattccgtaagggataccgtgaacgctattatccaggacgtttccgcgcgcggggacgaggccctttttgattatgccgccaggtttgacagggtgcatctggatccttcctccctgttcgtgacggaggcggagctggcggaggcggaagccgccgtggaggattccgtgaaagaggccattgccgtctccctggccaacatccattatttttcagaccgcagccgcaggcaggactggtccggcgtgaacgcccagggtgtggaggtggcggaacgcttccttccgtatgaccgcgtgggcatttatattccaggcgggaaggctcccctggtgtccacgtccatcatgacgggcggttttgcccaggccgccggcgtgcgggagattgtggccgctacgccctgcgggccggacgggcgggtgaatcccgctcttttatatgcattgaaggcttccggcgctacggagattgtcaagataggcggagcgcaggcgattgccgcccttgcgctgggaacggagagcgtgaagccggttgagaagattttcggccccggcaaccgttttgtggtggaggccaagcgccagctggtgggagccgtcgccatcgacctgctccccggacccagtgaggtgatggtgctggcggatgagaccgcagacgcggagttcctggccgccgacctgctggcgcagggggaacacggtccggacagcgtggtggtgttcgttaccacgtcggaggcgttattggaacaagtggaagcggaggtggaacgccaggccgccctgctgagccgcggttccatcatccgggaggtgctggacaagcacgcttacggttttctggtttcctccatccaggagggggtggacctggtgaacgccttcgctccggagcatctggtgctcgtcacgcgggatgaagacgccgtactggacggcatccgcacggcgggcgccatttatgccggcgctctttccacggtggcctgcggggatttcctggcaggtcccagccacaccctgccgaccggcggggccggcaagtcgttttccggcctgcgggcggaccagttccagcggcgcaccagcatggtgcggatgaaccgggacgccgtgctcaagtccgccccgtacgtggcggagttcgccagagtggaggggctggacgcccacaaccactccctccaggtccgcgccgcccgcgttgaccggtaattccaaacttcccccaccccccatgaaacgacagcaaggaaccaaggaacgattgctggacgcggcggagtgcctgtttgccgagcacggctatacaggcacttccttgcgcatgatttcccagcaggcatccgtcaacatcgcctccgccaattattattttggcggcaaggaagggctttggaaggcggtcatgatgaagtatgcgccgcaggcgcgggatttccggatttccatgatgaatgaggccatggagaaaggcacggtgcgggcgctggcccacgcctatgtttacccttccttccacggcctcctgcatgtgaagctggaagaactgggcaatttcccccattacctgcgcctgctgggcatctgccacgtgcagactccggagatagcggtggagtatatcaaggaggtgtattcccccatccgccgccggttgcatgactgcatccgcaccatgtttccgggcgcttccacttaccaggttttctggacggtgctggctattgaaagcatcatgatcggcctgctgacccgtttgcggatgattgtggagctgatggagaacaaccgggttcccaagggcagcgtgcaggatttgtttgagctgattgtccgccaggtggacgggctgatccatttgtgcgggcagccctcataaccgttttactgccgtccgtaccccatgttcaaatccctcatccgcacgtttgccatcgtggcggcttttattgcggggtacatgatgcccggtctgcacgtctacagctggacgttcaagtggatgctgatcgtgatgctgtttgtgacgttcctgggcatccgcttcaagcggatgaagccggagcgcgcgcactggctcctggtaggggccaacctgctgatcgccctggccgcgtggggcgcgtgccgcctcgttttcggagacggatacctggcggaggccgctttcttcgtgggcatcatgcccacggccacggcggctcccgtggtgatggggctgctgggcggcagcgtggagttcatgctgacggccctcctgctgcttaacggcattatttgcgctctgctgcctttcattctgccggcggtcgtggggcagggcggctttgagatttacctgaacgtggcccagaatatttccctggtgatgctgctgccgctggtcctggccctggcggcgcggcgtttttatccgcgggccattgcgtggccgcggaagctgaaggacgtcaccttcggcatctgggtggtgattctggttttgatcgcggcgaacgcctcttatgatatttcctcccgtgacggcatttcggagcgcgtgctggaacagatcggcgcagtttccctgctggtgtgcgggatcaattttggactggggcatttgctgggggggcgtacccgtgccgcggagtgcagccaggccctggggcagaagaataccacgctgtccatttacctggcgctgacgtatgccagccccatcgccgcgctggggcctacgttttacgtgctgtggcataatttatggaatgcctggcagttgtaccgggcgtccgaacggaagcgcaggaacggctgacgtaaattgccgcgcatggcccggagaaaagcgcccggcggaaggcggagagaagggccggaaagtgggaaaaaggcaggaaaaagctttcccgggccggtcccggggactggcggggaaacggttgtcgtcggctggtttgttcgccttcaggtgcagcggagatttcctccccatgcaaaaagcttgaaattcagggagcgccgggtaacgttatgcatttgttatgcaggccccttctcctttgaaacccctgtctccgcgcaccaagtggctgattgccctgtgcttgtgcgcgctcgtgatgctgctggagttcctgacgtaccatatggcgtaccgcatcggttatgatgaagggatgctgaccacaccgccggtggtggtgcagaagagcgatgaaaaggccatgcagaatttatcccgcttcatggcggatgttttcgcttcacgcgagagcttggccggcattctggacaaccgggaggaacgcctggcatggatcagggatccggagttgcggacggagacggcctggggcctcacccgtgagctgatcagccgggacggcgtggaccgcgcccttcctgcggccagggaattgattgacgccggatatgcctccgggcgctaccgggtgtgggccccccgcgcggacgccgtggccaaggcccttctggcggagcaccagtattccccggcctacggttatttgaaaaccgccgtggaggggtatgagaaggagggaatggccgagccgctggtgcgggccctccagaccatgagttccattgaccagatgctgaacaggaatgaggaggcgaacgtgctgctccagcacgcggtggacgccgccgcccatctggggacggacgccctcccggtcaggtccaggcttatggccgcccagggccggctggcgcgcgccacggggcgcattccggaatcgcgcgcctatttcaagaaggccctggccctgtgcccccagccggacaagacgaccggtgacctggccctggcgagcatcagcatgggagaagccatgctggaggccggcaggaaggatgaggcgcgggaattgtttttaaagggccttaccggttcggagaacgcctcctacttgttgaatgactgccttaacgccctgcgcgggctggcgcgcatttccacggagcaggggaattatgaggaagccctggcttatctttaccaggcggagggcgccgctcgcggcgtgctgccggcggaccatgcattctgggccgggctgtacgatcagagggggtgggtgaacatcatgcgcaaggccgctccggaagcccgcgcggatttcctgaaggcgattgccaacagcgcggcttcccccgtcatttccgcccagtccctggaagggctaggcaaagcgtggctggatgccggggagggggacaaggccagagaaaacctgcaaaaagcccttcaactgcgggaatcccactttgcctcggatgtcctgtccctgggccgggtttattattccctggggctcgccagcgatatggcgggggaccgggaaagcgccctgcacgcctatgccggagcagtggattccctgctgaaatgcggggaggggccggagcgcagaagtctgctggtgcagtcctatttgtgcaaggcatacgccctgtgcgacggagagcagtggaaggaggccgtggaaacttttgaagcggtgctccccatgctggagggggaacagcggtcggagaattacaagcagcttggccgctgttacgatgaactgggaatgaaggaaaaggcggatgcctgctggaaggaatccggttttccccgcgtgcgcatggcctctcccgggcgcaggccgtccgggaacgccagatcctcccggcggtaggcttcgggcggtcctcgtaagacgttgcgaggtgtttattttgcttgatttgtgccgcctttttggctcaatgcctgcatgagttccgagcgccatttttccaacaagccctaccgcccctcacgcaagaagaagtcttattggaagccggttctctttctggtgctgctgggggggctctggttcggctacattcagtactggcccacgattgaagggtggttcaagccgaccattcacgaggtgcacagccagacgcaggccatgggccatttgcagggcatgctggcctcctggaacggttccgacgcggagctggcgcagatggcttcctccgtggacaagcaggtggaatggatgaattccccggaagcgcgggattcctttgcgtggctgctggcggtggaaatggacaggcgcggcatgctgaaggagtccgaaccgatgctggcggccctgctggaaaagaagctggccgattccgcctccatgccggcggaggacaggaaccgcctgctgggcgtcagcctgaactgggcgcgggagtttgcaggccgcaagcatgacgccacggcggagaagctttatgaagtgattttgaaaaatacgccggaggagcaggtatccgtccgtctggcatgcctggaaccgctggcccactatgcgtatgaccaggccaggtttgagcgtttttccgcgttgtgcaagcaggccgcctcccctgtcatgaggagcatgctgaaaaagccggaggacgtgaagagcatggtgaagattctgctgcttcaggatactctgccggacaagactacggggcagcccggcggcacaggaagcgccattgcccgggaactgctcaccaaattccgcctgaccgccagtccggatatgggccgaatcatcctgaacgagctgaatatgccgctcaatgcgcgccgtaagtattcccaggcggagctgaaagccatggctgaccagttggaagccgccctgatctgctttcgcgccgcggaaacggagatggactgcacgccggaaacgatgcttgccctggcgcgggtaaggatgcagatgggggatttgaaggaggcttcccgcctgctgtcccgtgcggaagggacagcgatgaccctgggcgtggatgccccgcgcattctgagcggttccagcctaagccaggacattgaggctctgcgttcccagcttgagaagtacggccaggcggaggccctggtgaaacgggcttatgaggacgtgaacatcgccgccgccttcctgaaagcgcgggattatgaccaggcgatgaaatatctggaccaggcgatgaaggtggcccgtgagaacaccacgtttgtccaggccctccagccggtcattctgaatcttcaggctgagataagcgcgggcagagaacagtggtccctgtcggaagcccagtatggaaagctggttgaagaatgggatgcgctgagtccggaagacaaggcgaagctccagaataatctggcctccatccagtccggagacctttacaacaaaattcaccggagctgggctgacgtgtgtctcaagcagaaccggaccacggaggcccggcgggtgctggcgaagataggggaagccccggtggaagaaccggaaaagcctgcttcgcgccgccgccgcagataattgaagcccttttcagcaggctgacccgcgccccctccgcgggaagcgccgcgggcgacagacggcggaagaatgccttggcagcgtgccgcaggcctttgatcggcttatccggcacagccgcattagtgccggaattgctttgccgggccgctcttggctttcccgggcgcggatggcggaaagggggcgctttggtacagattgccgctttctccgccgcgcatgctgcggtatttccgctctccggacggagaacggctttttgatgtgataggagtatgctccacctgtaccggatgcaacgtttccggtatgattcaaggctccggggaagctgaaaaaacagcttccgcagattcctcagctgcggactttggctttctgccgcacgtggccgagagccctttttccgtggatcattttttcacggcggtcagcggcggactgacggcgggaacgcacggtatattttgcgaaaatttggctaaccgtaaggttcccctgttcaaaaagtgtgaaaatgttatctctcactctcatcgcttcctgaagcgccgcatcagcgcccccgtattgagaatcggagaaataacgagtgaataagcgcttgttcttacagatcgccaaccgatagccttgaaaggctgtcgtttcgtaagtgtagcgggtgatgtttttacaaggcatatgtacagaagttatgggaccgggtaataggagcagtgacaggcttctattaggataggttccacttcctgtaaaatccagaaaaaacacaatttgttagattgagtgcaaaaaatgcaatgctaggctcttgtggacagcctattgcggtgtgtcatccctgacataaaaacaaccgtcggagacacggactttcaatttttctcctgcatgtacctggttcgtttgccgtatgagctgcttattctggttttccaccagggcgtatccgcggcgcagcgtttgctccgggctgtgagcttccagccgggcttgaataagagccagttgtgaagagaagtccgccatgcgcacggcggccgcatgggccagtccggcctggagggaggccagaagctgcgcgcgctccctgttgcggtgggtgggatggcgcatttgtaattgatgttccagtttgttgatatggagcgtgttttgaaaaatgcgcgtggccgcgacattcagcagggtttcttccatgtcgtccaggcgctgggcgtaaggggagagcagggaatccgcatccaacagttttccccgcaggtaaacatccagtttcagcttggaacgcaacagggaatgccgtgcggaggcgtgcagggcctgttccattctagccagtttgcggagccattccggaccgtccggcgtagccagctccgcggccgcggtcggggtgggcgcgcgcaggtccgccacaaagtccgcaatggtgaagtccgtatcgtggcctaccgcggaaatcacgggaacggtgcattcgtaaatcgcgcgcgctaccgtttcctcattgaagttccacaggtcttctatggagccgcccccgcggcccacaatgagcacgtccacgggcggcaggccgttgagaggggctgcggaccaggcgcgcacggcagcggctatttcatgctccgctcccgccccctggacgcgcacgggcagcaggtaggctttcacccacggggcgcggcgttccagcacatggcgtatatcctggatgacggcgccggtaggggaggtgacgatgccgatggcgcggggaaaggcggggatgccctttttgcgttcagcgtcaaacaacccctcccgctggagtttttccttcagttccagaaagcgcgcctgcaggtctccctggccggcggctttcacctgcctgatgaccagttgaagctggccccggtccgggtacacggtggcgctgcccagcacatggaccttcatcccttcctggagccgtacggggcatttggaagccgcagccttgaaaaaggcgcagaagatttccgcgccctgttccttcagggtgaagtaaacgtggccgctggtatggtgcttgacgttgctgagctctcccaccacccactgggtccccacggcaatgctgaccgtatccctcaggcggtaaacgagctgtttgaccgtgatgggcctgggagcggcaggcgtttcctccgggaattccatgggttatggttcaaagggaatgttcagcgcttcataagccagcatcctgcattgcttgatgtccagcttgccggagggcagcaccggaatgtgctccacgggaatgatttccttggggcaccacagggccgggagcccctggtcaatcaggccgtgcctgatgagggtgcgcgcctggtgcacgtagtccgtcaccagggtggtgagcagggccacggcctcccccttcacggggtccggaatggtgacgacggctatccgccgttcctcgtccgccgggtccaggttccagatgttcatgatagcggcttccagggcttcatggggcaccatttccccgcctatcttggagaagcgggagatgcggccttcaattttcaggaagccgaattcgtccgcagaaccgatgtctccggttttcagccagccgtccacgaaaatgtcgcggtcggcttccggaccgcccaggtagccggggaagatattcggccccttcagccagatcatgccggaggtcgtcacgggtaccacgcggcccgtatgcgggctggtgatgcgtacggcgatgccgggaagcagagcgcccacggagccctttttcatgccgggaatgaagtctccggcggcgttggacggggccgggtcaatgaagttgacggagcagaccggggaggcttccgtcaggccgtagccttcgcacggaacggtgccgaacttttcccggaaggcggcggagagctcgtccggcaatttttccgctcctacgatcaggtagcgcacggttttgaaggtgtccggctcgcagcgcttcatgaaaccgcgcaggaaggtgggggtggtgaccaccaggctgatgccgtactgcttgatgagggcgcccaggcgcttggcctccagcggggaggggtaggtgaccatgtcgtacccgccgatcatcgggtaccacagcccgatcgtgatgccgaagcagtggaatacggggaggctgcccaggaatctgctttgcggcgccagcgtgatgcgggaggaacactgggagatgttggaaaggatgttgtggtgggtcagcggcacgcctttcggttctccggaggagccggaggtgaacatcagcacggcttcatccgcgcccgtgggcgcatccagccccagctttttaatcatgaaccccgctgtaaggaatttgatggccacgccccagcgtttggcggagcccttgagcagcggaatctcccgctccatgaggatcaggtcccgctgggggggccacgggaagttctggagcttgcgcatgaaggtatccgccgtgatgaaccagtccacgccggattgcttcacggagctggcaaaggccccttccgaggcggaataattgaaattcaccggcgtttttccggcgaacaggcagcccaggttggcgattgccgctcccttgccgggcggcagaatgatgcctacgcggcggttcgtggtgatctttttcagccgtttggcaaaggccacggagatggccagaagctggccgtaggtcagcgtggtatcgtcaatgccgtcgatcacccggcagtcggaatgaagctttaggctgcggaacagcagggcggacagggagccgtgcagctgcggcagcgtggcataggcctgggcggagcattccagccacgcggaggtgaggcgcgccgccatttccgccccgggagccagcttggggagaatgtgcacctggatatccgcctgggcgtccgtatccgcctccgcgtccagcacggagctggtgtaaaagcccgtgcataccggcacgggggaaatatggagtgcttccagggccttgatcacccgtgggggaatgtggctgatggagcctttcacgtgggctacgggaccgggcaggaatactacccttctgccctcgttgatgcgttccatgatggcggaacgcagggcaatgggatcgctgccgccggcctggaacaggatgccgtccgccttggtggattccagatgggcggcggtggccgcatccggggggaggctttcttccaccaggtacgtcatgcggtccctgcccagttccttttcgaacatcagcagggttttatgagatactttgttgaaaatcagcaggtcgccggagtcggatagattggaggaaccaaaaatggccatgggaaaaggggaaaaacttgcttgacgtattctagcaacttgccgggcggggagcaaggaggaaagaatacatcccgcgctgcttttgctccctccggaccggtcccggaatttgtccctggctccggcatgccttttatgggaaggatgttgtttttcatgggactgactggatttcacgcttctgctcccgcggcggaatttccggaaacaagcggtttcatgatgaaatccttaggaggttttttactgtgcccttcatggatggcttcccggctgcctgaaggccctgcatgcagggaaagaaaatgaacggatttgaaatccggacaagaagggcgtcagggaagtcgtgagagtggtggaaatgaaataatttgtttatgatcagatgtttattttaaattctgttggttttgttttttgaataatgtggctaatttgaatgagggcatggaatagaatggagataacggaaataatttaaagctttggaaacggcacttccagattgacaccggatttcaaatccgatatttcatctacctaatagcatgtctcatttctgctaaaagaccacgtctttctcaatatatttataattaattgttttctttatgaagctgcatttgcccctcaatttgttgtccgctcttcttgcctgctgcgctgcgttgtccgcctctgttcaggctgatcccctcaccattacgaccaaccagacgtttgatacggacgttacctggaatgaggctacgaccatcggcgccaacgacctgacgctgaccattgaggccggaaagacgcttacccaggcggagggagcgttcaacgtcggggacaacagccttaccattaccggcggcggcgtgttcaagattgaaacggcggctaccgtgaaagcggggaatggctccggaaccaggaccctgaccattgacaacgccacgctggatttgagctctccgggagccagcctcagcatgaaaggggataattatacgcgctacaaggtaaccgtcaccaacggcggcgtgctgcgcgtgggagaatatgcctatgacggcgcggggctgggttccatggccgtcaatacggggtactggaccttgaacaacgggcgcctggagattaccaaggaaagcgacggaaccttcgggaacggcctgacagtcgccgcgggcggcggcgccgtggaggtggtgaatgccggcagcaccatgtccatcactgctgacaacactcataatatccagctgaacggcgccctgaccattaccggagcagggaacatgatcacgggcagtgacaatgcattccgtggaaccgggcgtttgatcaaggacggctccggaacgctgaccctggccaattcctcttccttcacgggcggcgtggaactgaaagggggcaccctcattgtcagccatgcctccggaatgggaacgaacaagaacctttccgtaacggggaatgcggccatcggcggcatttccgcggggtacggcgggctttccctgtccgcgggagcgggcctggacgtctccgccgtggacagcaatgccggcctgtccatgaccggcggcgtcctgtcccttggggggcagaatacgatgaccggcaacctgaacctgggagcggccgtgcggattgacgccactcacatgacggtgaacggcaatcccctgctggccctgaacggcgccctgacggtgaacggcagcctgctgctggagaatagcgacagcgtgagctggagcgcgggcacgtacaatctgattaatgccacgggcggcatcaccggggatctggccaataccattctgctggggaccgaatacatcggcaactggagcacgacggacaataccctgaaattcgtcgtggcgcaggtcacgtcgctgacctggacgggcggcggagacaatacgtggacggtgggaggaacggggaattccccctggaatgcgggattgtcttttgccaacggcaacggagtcatcttcggcgacgtagcaggcaatgcaccgcagaccgtgaacatcgccggacaggtgaatccaggcctgatcgtcgtcaatgctgaggcaaccggttacacgtggacggggtccggttccctggtgggaagctccaagctgcagaagaccggcagcggaaccttgtccatcgccacggacaacgccggtttttccggagaagtcctgctgggcggcggcacggtggaaatgcagcatgcctccgcgctgggcaccggcagcatcatctttaatggaggcgcgctcaagtacggcacgggcattacggcagacgtctccggccagatcaagacggatgcgctggcttccaactccattctggtggacacgaacgggaatgccgtaacgtgggcttcactggccggctggacggggaccgtcacccgtacgggaagcggcagcctcctgctgggggccggcacttatggaggcaaattgaccaacagcggccccggttccctggtcattggcgcgggggactccaccctgaacgggggaatcaacggcaccatcaccaagacgggtacgggaacgttaacgctgggccttaattccttcaacgcttcaggaggaggaacgctggttgtggaacagggcaccgtgatgcttgcggacgaaaccggaacatggagctccaacctgaacattacgctgggggaaaataccgtgatggacgtagcgggcgccagaaccaaggtgacggggacgggtactcttaccatggggaacggctccaccctgcatctgaggaacggaaatgccgccggcgcgaatttcgacatgaaaatcgtcctggatgccgcaggaggatttgctttcctgaatggagccatttatggaaatgccaccgcggtttcatccaccatcaccggaacgggcggccttaaaatcatttccgatgccggggggaacaggtggggttttaaaacgggctgggtgaagaattcctatgacggggatacggaaatagccggaacgggcaacctggtcaatctgacgtacaatatcggggacgcctccatcgtctccggccagaccctgaccccgtgggggcagggcaacgtaacgctgggcggcagtgagaaaaacgtcaccgtgacgttcagcaacttgaatcccaataccgtcacggggggagtttccctggacggggacatcaccctgaaagggacgaatgcggccacggcgctgagcatttttaacggagccaccgtgaacgtgaacctcaacggcaaggtatccgtggaaacgtccggcacgggaacggcggccatcgcgagcggggacagcctccagatgctcggcggcctgggcggaacgggcacgctggctgtcaatacccgcaacaatgcgggagccctgacgctgggcggggacgtctccggtttttccggaatgctgaacctttccggagccaacctttacctgaatgcggatacggcgctggccggaacgctgaacgcctccaccgccaaggtgacggcgctgcggaagcagaacgtgaccggaacgctgaacgccgcttcactggccgttgacggaagcgccctgagcgcggacggagcgacgctgacggtgagcaacctggcgctgggcgcggatgcgggcgtcagcctggacattaacgggaatatcaccgcggggacttatacgctggtttcctgggacaacctgacggccggcaacttcgcggatgcggggacgatgaccctgaccggggcgctggccagcctgtaccagggaaccttcaacgtaaacaccggggacaagacggtgaccgtttccgtcagcatggcggacggcgtggtagtctgggacggcaacccgatcggcgccgtggacaacaccacaacctacctgtttgacggtacgcacacgggagtggcgtccctgacgggggacgtgaatgccaaggccatttatttcaacaacggggcagggcaggacctggagctgaccaacaacggaggcaagctttccggaaacggcgccatgaccaagctgggtgaaggaaaagtgaccttcaacagctccaataacgattattccggcgcggtcaacatcaaggaaggaaccgttgccgtgaaggcgaacatggccctggggaccggaacggtgaccgtggacaggacgggacggctggaaatcggcgtaacgggcggaattgcggatattctgggagccacgatgccgacgattaacggaggcacgatcgcctttgcttccggaggcgccaatacgcttggaaccaatctggccaacggctccggcatcaatctggaagtgtcgggagccggaacggccctgacggtttccaccgcccagacgaaaaccgcgctgaccacggtgggcgagggcgcggtcctgaacctcggcaagaatggaaacggaggagagtccatcctttacggcaacctgatggtgaacggcggcacgctgaatactacggcgggcgatccgttcggctacaataatagcgggaacttcggcacgctgaccctgaacaacggcacctggaatgtcggcggcggcaatacgaccatggccaataccagaatggtgttcaacaacagccgggtcattctgaatatacccggcgggggattaaacggcttcgacttgttcagcggcaccaataccattgtgacgcagcagtccgctaccggaatgagcgtcttctctgtggcggagggagccccctccaccggtcaggcgaatgccctgaccctccgcggcggcacggtcatctttgacatagcgcgcgggaattttgcgctggacgatactaatacggcagatttgaagctggatgtaatcgtagccaaggaaggcaacggcgccaacctcgtaaagcaggggaacggcgtgcttcaactgaccaaggccagcgattataccaaccagaccctgatcaaggaagggaccatcctgctgacgggagccggctccctgggttccggagcggtgacgctcggcggcaatggagacgccttcctgacctatgcggtggatgcggaccagacggtggccaacgccatcggcggaacgggttccatcacccagaagggtccgggcaaggtgacgctcagcggcgccaatacctatgccggcacgaccaatgcggaagccggaacgctggcggcgggaagcgctacggcgttcgggaccagcacggtctccatctcctccggagcgacgctggacatcggcaattatgcggtgaataacgcggtcaacgtgaaagccggcacggcggatgcgctctccacgggcgccatcaccagcaacggcggctccatcggcagcctgacgctgggcagctactcgcgcctcaacgtcaccggagacatggccatggctgcgggctcctccttcacctttgacatgacgggactgacggcgggaggaaacgccctggtgacgctcaccggcggactgacgctcaccggaacgcacaacgtcaccctcaacaactacgacacgctcaccgacgcgggagactattccctgctgacggtgggaagcggaacgctcacgctcggctccttcaacatcggagatctcatcaatgacgcccatccggaactgacctacacgctgggactttccgcggacggcaaaacgcttcagctcaagattgagtcctccgcgaacatgctcacctggaacggaacggcggacgccggaacatggagcgcgggcgacgtgagcaactggacctacggcggaagcggctccgcgccggcgaccacggacgggcagcccctgctctttgacaacacggcagccaacaaaaccgtgacgattacgggagacgtggctccctcctccatcgtcgtcagcaacagcggcgcggacaacacctacaccttccagggagacgggcacatcacgggcgccacgaccatcctgaccaagaggggggacggcaccctgcaaatccgcaacacgaacacctacggaggctccacgtccctggaagggggcattgtggacatcaacggagacggagcgctgggaacgggttccatcatcttcggcggcggcaccctgcaggcctccgggaacgtgacgctgacgcagaccatggtgcagaaaaacgccggggacgcggtcaagctggctgcctccggaaccggcaccacgctgacggtggacacggccgggcaggacagcttcctgtccctcaactggaacatctccgggaatggagccgtggcgctggggaacatcgccaataccaagattctctccggaaccgtgacggtggccagcggctccaccctcaagctctccggaggcaatgaaatcgccctctccggcgtactcaaaaacatcagcggcacgctcgccaagacggacgggggctccctgctcgtcaaggcggccaacggccatgacgcgctcaacggcacgctctccaatgccggaggcagcatcgtcctctccggctacggagcggccacggccaaccgcaccgtcacggtgaacggcacgctgaatgccgacctcattgacgtcacgtacggcgtgacgctggacttgaagaaagaccttgatatcgccacgcttcaaatcggcggcggcaccatgggaagcaacacgcaagcctccgcggtcaacgtcaacacgggcgtcaccctcaccagcaccagcgtcaagctgggcggggccaacggccagggagccctggccggcaacctcaacatcaacggcggcacggccgtcctgggcggcatcaacctggaaaacgactccaactccggcatcacgctggccggcaacggaaccctcacgctgggcggtgacatcaccggcgcctccggcactctcaccctgggagaaggcacgctcaactccacggcggactggagcgcctccctcagcgtcctcctcaacgccgcctccggcaaaaccgccaccgtggacactacgggcggcagcatcaccctcaacggcgcgctcagcggcactggcagcctcctgaaaaccggcacgggcacactcacgctcggcaacgccagcgcaggctacacgggtacggtcacgctcacctccggcacgctcgccctcacggcggacggctacaagggagcgctcaacatcaccggaggcaccctcacgggaggaaacaaccacaaaggaaccaaaaacgttaccgtcaacgcggcctccggcgtcacttccatctcgctgggcggcctctccggctcctcgcttaaaaccatcggcatgacggacgccggaacggtcatcagcggcctcaacggcgccgccagcctggacagtgccagcctggtggtgggaacgggcaacgtctccaaaacacaggacctggccggaagcacctccatgatccaatttgacgcggacggcacccagctggaaattgaaaccctcaccctcaccctctccgccgacctcatcaatgccatgcagggctggggagcgggcgaccgcaccgcgtggctcaacctcacgaacggagcgctgggctacggcacggccgtcttcaacccgctgctggaaaccctcggctttgccgtcacgggcatcaacggcggctccatcggcatcaccggtgacgccacgcaaatctacgcggtaggcagtgaagacaaaaccgtctccagcaactccgaactcgacccgtaccgcgcggtcatcgtggacggcaacctcgcactcaacctcccgggcgtggacgatacggctgacggcctgacgattaacaacctctccggcgcggcctccggcgtcatcaacatcaccagcacgaacgacaagacggcatccgtcatcctgaacaacgagctgctgggaacagatccgaatacgtccggtcccgatacgaagtactccggaaccatcaacggcggcacggccaacattaccaaaacgggagaaggctccctggaactcgccggaaccctgaacaccagcggcacgctggacatgcaggacggcagccttatcctctccggcacggcggacctgggctccatcaggctcaactccaccaactccggagacctttcctccctggacatcactggaaaaacgcaagcgggaacgctcacggatgaaggcaacggcggcaacctcgccatcggtaaaaacggcacgctcacgcttacgggagccggctccgaactttccaacagcaccgtttccggaaccggcgtgctccatgtggcggacaccgcctccctcgcgctcaacggcacctccaagcttgacggcgtgcaggtggacctggacggcagcggaatgctggaactcggcaacgcggccaacaccatctccggcctgacgggaaccggcgcgctgaacaacgggtctgccctggaaatcaccaccgccgggaatgccttgtatgaaggcaccctcagcggggaaggcagcatcaccatgaacggcaccggcacgcaggttctgaaggggaacggcgcgatcgggcaggccctcagcgtcaccaagggcacgctggaactgacgggagcggaaggcggcaacggctccgttacctataagagcctcacggcggcaagcggcgcccatgtgcgcctgagtccggtaggggagggaaccggagcggtcaacacgacgctcaccgtcgccaacggactcaacctgcaaaactcccatctggacctggtcatcaacaccaaccgtgacgacctcttctccagcccggtcatcaccgtgcaggccggagacgtcaatctggacggaactaccgtttccctgggaagcctgggggactacgacgatccggcggacccgacggccaacctcaacttcacgctggtggacgcgacgggagccggaacggtttcggccaacggagccacggtggacgcctccggctactttgacttctactaccaggaattcggcatccggacggaaggcggcaagattgtggtgacgggcatggtcaagacggagaacgcctttatggacgcggccaacacggccaactcggaagcgggggccaacctgctctggaacaaccgcggcaacgcgccgaaaggcacgcagctcggtgacctgagggaagccgtcagaaacgacatccagtccggcaacacctcccgggcggcacgttccatggcagccgcggcaggcagcacggtcaacgcgctgggaacggcccagaaggacgccctgcgcgaccagatgggatggatccgcaaccgcaccaccctcatgggcgtcaaccccgcctacgtcaacgaagacctcccctacttccacatgtggatggaaggcacgggctcctacgccaaactggacaccaagggagatgaaagcggctaccagctcaccacctggggcggcaccgtgggcatggacgtggacctcagcgaccacttcacgatgggagcggccttcacggccaactacggcgacctgacggccagcgcggcggactctgcggacggccacctggacagctactacgccaacctcttcgggcgctaccagagcaagcgctgggcgcacacattgatcctgacgggtgggtggaacgacgcgaagctcaaccgcacggtcaactacggggaaggcagctacaggacgcagggcaacaccaacgggtggggctttggagcgatgtatgaactgacctacgacgtgtacctcaatgaagacaagagcagcatcctgcagcccctggccaacgcctcggtagtaaccacgagaatggacggctacacggaaacgggagcggggaacgcgggcctgaacgtaggcaagcaggaatggacgacgggaacggttgcgctgggcggccgctggatggggctcattggcagcaacatcttcgggcgagaagcgctggctgagttccgggtgaacgcggcccaggacatgggcgaccaccgcggcaagacgggcgtaggcttcctggccaatcccggctatacgcagacggtcagaggagcgaaggttggaacgacggcgctgcaaatcggagcggggctgagcgtaccggtaggaacgcagggaacggtcttcatcaacgggaacgcggacttccgtgacggagccaactcggtgaacggaagcgtaggctaccggtatgacttctaaggagagttgaagtttgagagtggagagttgagcggagacgctctgctctccggacttccagggccgttccggcattgtccggaacggccctgctgcgtcacggaacattgcatgctgtgcggcgcttctgccggcatggtgcagtagcgcagttgatatcatatagtggaataaatgatgttaaaatggattattgattccatccggaatgattcgcaaggcggattaaaaatccgctagggaacggaaaagccgccaatataccagaatgaacctgcttgcatgtttatactgataaggataccaccacgaacatacctgattgcggaccagatatagcatgaaaacggtcttccaggagagttgcaacgcctacggaatcaacgtttaagcttgtaggaggatttttaatccgttaatgatgataaaaagcctcctgtcaggttcaggaggtattttcacgttcattttcattaaaaattatgaagctgcaccttcccttgggtctcctgtcctctctgattgcctgcatggccgccgtttcctcaccgcatgccttggcggaaacctatacatggcttggcggaacggatggctggatccatacaaatgccaactggaatccggcgccgaccaattatgcaaacgtgtgggccggaaccagtgccaatattatgcaattcagcggaccatatggagataatgttcaaaaggccgtcaaggcccagttcaatagcttgtcgctgggtggcattaatgtggcggcaggtgcttcaggattcagtgtatcctccagcgacggcggttcccgcgtcgtcaatttccgtgctccgggagaagggcaggcgacggttttcaacatcggggaggatttttcgttaggatcaacgggtacggcctgggagggcgtttcattttatgcgaataccttgttccagatcgctgcaggcaagaccatgaacgtttatggagcgcttgcggttggggaagggattactgatccccccacaattactgtgggaggtgtggggtattctggtacgctgattttgaattcggccgcacagacgacgaatgtaactgatcaatccgtcaacaggaaccgtcaggccatgacagcgaactggatggttacgggaggggcaacattgcagttgaataatgctactgctctgggttcgggaatggtgaacctgaatggaggcaatttgaaagcgcagcatgatgctacctacaataatacgctgaccgtgagtggttcatctggcctgacggtaaacgccgccacgcagttttccaatgtgactcttgccgccgcgggttccctgaacatgaatggtggaactcttggtattgccgctgctggcagtctgacgctgggcgcgtccggcacgattacgggaaacctgacgctgggaaactcgtccctcctgaatttctccgctcttccggcttccggcgcgtctctgcttaatgtgaccggaacgctgaccgtgaacagcgaactgcttctggggcagggaacgatagacggcgtggcctggacggagggttcctatgacctgatcagcgcgggcaccgtcaccggagttcctgccagttcctttgtcctgggcgacaatcttctgggttcctggagcacggggaacggcaagcttaccctggtggtggcgcaggtggctttgcttgaatggaaggggggcgacggaatctggtccgtcactgctcccgccgcttccccgtggaaggacgacggcgtttacaatgataatttcggagtcgtcatgggagacattggcggcagcgccccgcagacggtgaccattgatggcgccgtctctcccacgattatcatggtgcaggcggatacgacggattatgtatgggatgccgcggcagggggcggctctctggaaggcaacggtaatctggaaaagaccggcaacgccaagctgaccatcaatacggccaataccaactataccggaaaggtgatcctgggcggcggcacgcttgaaatgggagatgacgccgccctcggcgccggcagtctgtcgtttgacggcggtatcctccagtatggcgctggcgtgacggcggatatttccggacagatttcctccacgagcaagaactccattaaagtggataccaacgggaacgccgtaacgtgggcttccgtggataattacaaggcgatggccatggaaaaatccggagacggcaccttgaatcttggcgccgccgtgtatgcgggcgctctgacggtggacggaggttccgtgtccattgcctccggaagtgttcaaacgaggttttccgcgggagtcacggtgaatgcgggaggaaccctcgccatttccagcgccatcgatggaatgccttccggaaacagcgccaacatcgtcatcaacggcatgagcggagcgggccggattgagctggacaaccaggcggccaaatcccgtttttacatttcaggagacaattcatcctttaccggggaactggttgcatccgggttgaataataatccgggcagtacaaatgatgcccgcgacctccagtttgccaccgccgccagcatggggagggggacgttaaccctgaatggacgcggtttctggatggatgccgtcaacacggcggataccgccgtcatggcaacgatcaatgtgctggagaaaggaacctacctaaacggagggagcggcaagtcctattactttggcggggcattcaccggttcaggtacggtgaccaccgcactgggggatgccttcgcctacttgacgggagacatgaccgggttccacggggcgttcacccgcactggcaatgccctgtttacctgggcattcggcaacaatacggcggcgaccctgaatgatggcaagcttttcggggatggtgtggtgttaaaggctgacggcggaacaagcttgttcaaattctcctacaccaatgacctcgttctgatgaacgccaccgtaggagcggaaggcgccctgaacgccagggtggaacaggccggaaccggaacgctggtgctgacgcaggacaataccgctacggggacgctcaccattaccagcggcacggttcagctgggcaatggagagggcacaggctcctgggtcgggcagattaccggggcaggagctctgatcgtgaacagggccggcgggtccccggtcctggaactgaacgccgctaacaattaccagggaggaaccaccctgaacggcggcacggtgaaggcgctgggcgccggttccctggggaccgggaatgtttccgttaacggcggttccgttctggacatgaacaaccaggcgattgccaacaacatcaccattaccaagggagggctgcaacatgcaggagcctacgccactgccggcggcgtaaccgtgaatgcggaggccaattccggggatattgacctgggcggcctgtccggggacaaggtgggcggcatcaataccgccacggcgggaacggccattaccggcctgacgggaaatctgacgctgacggggaataattccctgcatgtgggtgcgaacaataccacgtatgccgctgccggggaccagaagagcctgctccagttcaatgacacggccacgggcaccgtttccttcggcggggacgcttccgacctcacgctgcacatggacattgatacggatatcctgatcgccatgcgcgaactggaatccgtaggcattctgctgaccgacggaacgatcaccggcctgccttccagcgacctggtggcgtggctcaaccagcaccttacgttcaatgccacgctggaaagcctgggattcggcatcaagggggtggaaggcggcagcatcatcatttccggcagaacggaccagatttacatttcgtccgtggacggttccacggtgacggaaattccggcccttaattcctatgcgcaggtgattgtggacacaaacctcaccctgaattttgacgtgcctgcggccaatacggacaagaccatcatccggcatctttcctccggcaccggcagcacgggcaacctggtggtgaatgccgccggggacggttcgctggatatcgaacttgcgaacgatctggacgactccgtgttcaacggcaatcttaccgtgaacggtgacggcgcggacctgatcaagacgggagaaaagaccctggtgctgaatggcaatgtcaatacctccaatgcggtggttgccagggaaggcacgctggccctgaacgggagcgccaataatatcggcacgctgactttgtcctccgcctctgcggatgaacccgtccgcgtcgtgatcggagggaccacgacggccaccctggcagatgacgcggagggcggctccctgcaaatctctgcgggcggaacgctcaagactgccggggattccaccctggaccaggcgaccaccatttccggagcaggccgcctgaacgttcaggaaggttcttccctcaccctggcaggggaagccggcctgttcggaacctccgtgacgctgaacggaacgctgagcctgtccgggaccggggagaagtccattctggccctctccggcgctggaacgctggccctgaatggcaatgcactgtccgtcacctccgcatccgccgtgaacggctctttctccggcacactggacggggaagggagcattgacgtctccggcaaggtaacccaggtgatgcagaccggaagctccacgtatgacctgggcgtgcacggagggggcaccctggtgctgaaaggcacgtccgccgctcccgcgcttgactaccgcaacgttacggtaggcgcttccggcaccctgcgcattgaggccatcgggaatggagcaggggaccccaataccaccttgaacgtcggcagcgttgacttccagagcggttccatgacggaattcgtgtataacctgagcgcggccgatcctttcggctccgccatgctgacggcggattccattactatcgggaacggcgccggctttacgcttgccaacatgaccggcaacacgggcctgggaacgtatgacaacctggacggagtggtgctgatgaccgcggacgcgattgacggcatggcggaaggggaatccatgtccgtgggtacttccggactctttgccgtgtattacaaggatgcgaccatggtccgggaaggaaacaatattgtgctgaacgccacggtacagcaggataatatttttaagcctgcggtgaattcccataattccggagcaggttccgaacttctgtggggagccaggaacaacctggacgccacttcccggctcgggcaggtcatgaatgccatcagcaccatggttacggggagcaatcctgatttggcgggagcatccagggcattggccgccgtagcgggcagcacggtcaacgcgctgggcacggcccagaaggacgccctgcgcgaccagatgggctggatcaggaaccgcaccaccctcatgggcgtcaaccccgcctacatcaacgaagacctcccctacttccacatgtggatggaaggcacgggctcctacgccaagctggataccaggggggatgaaagcggctaccagctcaccacctggggcggcaccgtgggcatggacgtggacctcagcgaccattttaccatgggagcggccttcacggccaactacggcgacctgacggccagcgcggcggacagcgcggacggccacctggacagctactacgccaacctcttcggccgctaccagagcaagcgctgggcgcacacattgattctgacgggaggctggaacgacgcgaagctcaaccgcacggtcaactacggggaaggcagctacaggacgcagggcaacaccagcgggtggggctttggagcgatgtatgaactgacctacgacgtgtacctcaacgaagacaagagcagcatcctgcagcccctggccaacgcctcggtagtgacgacgcgcatggacggctacacggaaacgggagcggggaacgcgggcctgaatgtaggcaagcaggaatggacgacgggaacggttgcgctgggcggccgctggatggggctcattggcagcaacatcttcggtcgagaagcgctggctgagttccgggtgaacgcggcccaggacatgggcgaccgccgcggagaaaccaatgtggcgctgctgggcaaccccggcttcatgcagagcgtgcgtggggccaaggttggaacgacggctctgcaaatcggagcggggctgagcgtgccggtgggaacgcagggaacggtcttcatcaacgggaacgcggacttccgggacggagccaactcggtgaacggaagtatcggctaccggtatgacttttaaggagagttgaggtttgagagttgagagtggagcggagacgctctgctctccggacttccagggccgttgcggacaagagccggggcggccctgcttgtgtaaggaaatagcgtcctccggagtaataggccgtgtgggctgaaaggacagagtagaaaaaaaaaaatggtgtccatcctgtccatcaagtccattttgtccactactctccctgcgccgctctctgccctccacacggcacgccccttccgattctataaaacggcgcagaatactcctgcgcgccctcgtccgctgtctgatgtcagaaaaatccggaaggcgtggaatagggccttttttatgcgattgcggcggctttccattccagcactgcttccgcccgcagttcgtctccgtgcatgatgtggtgggaggtgagggagtcctggcggaacagcagggatttcatggattctcccgcatgggtttccttcttgaaatgcaggtggattcccgtcaattcatggttctccagccaggaatccggcagggattccagcgcccagaccaggtaggcggcattgttgatgtggcggttgaagtccgtatcgcggcgttccgccatccattcccggatggtcggcagaaggcccgaggtatccatggctgccggagccaccgtttcttcacacggagtatccgggaaggcatcaatgtgcctgttcaacggcaccgggcgtctgcggcgtacgtcaatgacggcccacaggcagcttgccgtgacgatttggtttcccagggcgtcccttatttccagattgcggcgcgccagcagcggcgtttcctgcgcggtccaggtgcggagttccaccgtttccttccaccgggggaggcggctgatggccgtgtttaggcgcacttccacccaggccaggccgcgggacatcacaaagtcatagccgaagccgagggaggaggcgtgggcctccgctatttcctgaaaccagtgcagaaccgtttccggtttcatgaggccgtccgcaccgctttcataagtgcggacagtggcttgagtggaatagattccgtgggcgtcggcatgtttcataacaattcattttagccgaaccgttttaccgcaccagccaaaaacgggtaatgagccgctcggcatgccggagttcatggaccgcatgggaagcttcccggaatttccggattgcttccttggagcgccgcttgcctatgcggcaaccgaaaggaacgcggctgtaagccacgccttttaatgaaatcagttcgccaataatgattaagttgccgcataagcatgcggcgcctcggaaacgctacagaatgctccggaagtaggcgatggttttttcaaggcctttttccagcggaatattgggcttccaacccagtttttctcccgccagccggatgtccggcttgcgctgggccgggtcgtccaggggcaggggacggaagaccgttttggaagaagaacccgtcatttcaatgactttttccgccagttccagcatggtgaattccacgggatttcccaggttcacagggcctgaaaagccttccgtgttcatcatgcggaccatgccttccaccaggtcgtccacgtactggaaactgcgggtctgcctgcccgttccgtaaatggtgatgtcttcccctttcagcgcctgcacgatgaagttggagaccacgcggccgtcgttcgggttcatgcgcggtccgtaggtgttgaagatgcggatgatgcggatgtccaccccgttcatgcggcggtagtccatgaacagggtttccgcgcatcttttgccttcatcgtaacaggagcggacgcccacgggattgacgttgccccagtaggtttccggctggggatggaccatggggtcgccgtatacctcgctggtggaagcctggaggattctggccttgcaccgtttggcgaggcccagcatgttcagcgcgcccagcacggaggttttaaccgtgtggatggggtcaaactggtaatggggaggggaggcggggcaggccaggttgtagatttggtccacttccatcacgcagggaacggtgacgtcatggcggattatttcaaatccgggatagtccgccaggtgaaggaggttttgcttgctgcccgtgaagaagttgtccatgcagatgacttcatggccttctttcagaagccgttcgctgaggtgggagccgatgaagccggctcctccggtgatcaaaatccttttactcatgatagcatgtccatgcgttttgcgctccgccgcgccggaagggaaggcggatattcctgcgtggaacgggaatttttcgtcccgccgtgcgttgcggttcaatgtcacatatccgtcacgtgaaggcaagcgcatagcatgccggacaggattttcccgggcgggatgttttgtggaacagccgggcaagggaaggggatgcgatggaagaggaaagatggttccgtgcgggccgggaagcagatggagacgtgcaggccccttggcggggtcaggatttgggaagtgtcagcaggaagctggctccccccaaggtgccgaattccagtttcaggtccccccccagggagcgtgccgtatccttggccagcgccagccccaggcctacgccgggcttgcggctgtcggaggcgtccttcgtgcgccggaagggcttgaacaccagcttgcggtttttcggggagatgcccgggccgttgtcccggaagcggatgacgatgttgtggcggtccgcctggacggtgagctggactttggcgttttcccccttggcgtatttaatggcgttggaggtcaggttgtccatgatctgctccacggagacggcatccgtatgaatgggcaggatgcggatgggctgcgccagggcaaaggagaagctgatgcccgcctcccggagccggcggtctattttttccgcaatgggttcaaagagttcctggcaggtgagcgtatcccgcgtgcggcggatggcgttccgctggagccgggagtaggagagcacgttttcaatcaggtgttccaggcggcggcattcccgctgcatgttggcgtagtattccggctttttctgctccggcaccatgccgtcctccagcatttccgtatacagggagaaggaggtgagcggcgtcctgagttcatgggtgacggcggagacgaagtccccgcggcgctgctccaggcggaaggtgcccagcatgagccagatgacgcctgccgcgcccagcagtaccatgctccagatgagcgtgagcgtccaggtcagcattttcttgtggtcctggagggggacggctccggtgtctcccggcagaaagaccaggggggcgttggcaaaggggagcgtgcccgtctgccgcgcttctgcgggaggcggggcggagggatcgaaggtagccaggcggctgtggggaagcaacagctttacctggccgggcagccgccggttcaggttgtccatgttcatcagggccccctgcaaatagacgccgcggctggtgtgcacctggcgcaggatatagaggttccccccgtcttccactgggacgaaggaggtgacggtttccacctgggccggcgtgccggatgccgtcggctcaggttccggggcttcatgcaggatttcattccgaatgtccgtccagaggttgccgctggacggcacggaggtgagggcggagaccttgccgttcagccgctggtagaggtccttctgctcattcagatgttcggcaagctgcgggtccagcgcgggtccggttacatggccggagggggaaatctggatataggccgtgacgtagtccggcaggtaggaggagaggttggagccgcgggcggcctctccgggttccggggagcccatgcgctggtcataagggcgcttgtaggcgtaaaagggctggtattcaaagtagccgcgggcctgttcaaaggtgatgaaggaggtcaggaggcggtccatttccagcttggcttcatgagccagggcctccaccctgatgcgctgttcggagcggcccgtttcctccgcctgcaccagcagaacgtgggtgagccatccgagcgtgccgatgaccagcagcaggctgattgccagcagagtgatgcgtatgcgccggttcacgggtcaggagacgaaggatgagttccagcggtagccctggcttctgagcgtttccagcggggcggccgcgacggtccccagcttgtcccggaggcgcatgacggtcatttccacggagcgcgtatccgtcaggcgcgggtccacgtcccacacgcgccggagcagttcgtcccgcgtgatgacgcggttggggtgggtggccatgtacgtgaggaattcgaattcccgtgcggtcagggaggtttcctttccgtcctcaaaggtgagcaggcggttggcgctgtccagggatgcgccggggatccggatttcccggagctggcgcggccgttccggggatctgcgcagcacggcctcgatgcgggcgagcagctcccggatgctgaacggcttgacgatgtagtcgtccgcccccagcttgagcccctgcacgcggtcctcctcctccccgcgcgccgtgagcatgatgacgggcgtgccggggcgctccgcagacatgacctggagcacctggaagccgtcagctcccggcatggctacgtccagcagggccaggtcaaagttgcgttcccgcacggcgcggatggcggccaggccctcttccagcgccagcacctcgtagccggatgcggtcagcacgtccgtcagggcgtgcctgatgctgtcgtcatcctccgcaatcagaatggtataggctgaatcactcatcgtttgattctataaaaccacaatgtttccctgtttgtatagagaaacctgcgccctttcagtaacaatgccataacagggcggttcccggttcggaggttttcttttccggagcagcccaggtcagttctgctggagcgcctggaactggggcggaaggctcccggagggaatttctatggcctccatggggccggggacgatgccttcaaagaacggcgtgcccttgtaggaaaggatgatcttggaatggaccatgttccccgtggtctggcgcaggaagtccgtatcccggaagaccaggagcgtcttcccgttttccgcggccaccgggcggcactggaagttgcccagcggggcgccgtccgccgtcgtcatctgtacgggcagtacgtaggcttccgagaaggtgggggcatagacgccccagagggaggtgagcgccatgacgacgacgatcacgatgccgacaaatatttttgtggaggtagacatgcggagagcggtattctggaccgtacgtccacctcctgtgcggaggccgtgcggcgtcagcgttgtttaagccattcggcggcctggggggcgtaatacgtgaggatcatgtccgccccggcgcgccggatggaggttagagtctccagaacggtttcccgttcatccagccagccggaagccacggcggatttgatcatcaggtactccccgctgacgtggtaggcggctatcggcagcgtcacgtgcttccgcatggcggccatcacgtccagatacagcgtggcgggtttcaccatcaggatgtccgcgccttccgcttcatccagctgcgcttccctcagggcttcccggatgttgccggggtccatctggtacgttttcttgtccccctccttcggcgcgctttccagcgcgccgcggaacggcccgtacagggcgctggcgtacttggcggtataggccatgatggagacgtcgtccagggcctcggaatccagggtggcgcggatggcggccacgcggccgtccatcatgtcgctgggggagacgatgtccgccccggcgtccgcgtggcacaaagcctggcggcagaggacctccacggagtcgtcattgaggatttccatcgtgccgtcggagcggaattccaccaggccgtcgtgaccgtctgaattgtaggggtccagcgccacgtccgtcatgacggtgatgccgggcacctcgctcttgagcgcgtaaatggtgcgcggaatgaggccgtcagggttgcaggcttcacaggcgtccggggttttctttccgtccgggatggccgggaaaaggtccagcgtgcggatgcccaggtccatcaggcgcttggcttcctccaccaggcccttgacgctccagcgcgtgcagccgggcagggaggaaatgggctggttcccggttccttcatggacgaagaccgggtaaatgaggtgttccggggagagggaggtttcccggatgagaccccggatgttggcggattttctgttgcggcgcggccgtatcggtagattcatcatggtgtgataatggaaaaggttgtgtgatagaggggcgggcgttccccgggcggttttcagggttttttttgttcgtccagcgccagcgggttctccacatcagctccggtgaccatccagccgctgtctgttttggtaaggtacaggttgttgacggagaatccgtttctggaagcgggccgcacgccgatggtggccttgatgccgggggcgccgtctctggtgacgggaacgtaggcagccttgacgacgggagcgcctttttccttcacctcggtccggggggcgggaatcctgcccatgaccgttttcaactgggagagcgcgtcttcaaattccttcacggaggcgaatttggccggagccagcatgcgtatcatggccaggctgtcccggttcgccagggcgcgcccggcggcggtcacggcctcttccggcgtgggaaaggccaggggggggtaggtccggtggaaatccgccatgatgcgggcggtggtggattcgtccgctttcaggttccatgaagtgaaggcgtccgtcagatacattttgaaaacggggaagccatccgtggggtccttgattttctccagcgcatagcggtaaatgagagcgggcttgtccgtgtccggcatgctcatgcgcgggggcaggatggtcatggccgcaatgctgtggatatccttgccgcttttcttcgcgttgtttttattggcctcctcctgctggtcctcatcccgtttgttcgggtctgtctggtcgtccggatgggggcgcaggggaaccaggatggtgttcggaaaggtcatgaagctgaggttggtgggctggatgtagcggctttcctccctcctgtcctgaaggcgcatggccttgaccacgggggtgagccgggcgctctgggtgatggcggattccatgtagtacggggaaacgagcagggcggcaatgcgtgccgggtcatcccctttcacggtgcggatgagcagggtcttgagttcgtcgtccgttttcccctttacggcttccacacggaaccgcttgatgtgctccagggcggctttgacggcggccacggagtactggtgggcgaggccgaagattttcttcttggcttccgctgatatttttttcgcttcctcccggatttggtcgtcaaagggaaggaacgtattgtcaaagctccctggggtcagggaggccttccactggccgccctttttcaccagggccaccgcagtggctgcatagacgtacgggtttgtcttgtccggcagcaggatgtaggccatcgccaggtctccctgggtgatgatggaggcttcatccacaaaaggggggcgttccggggccgctccggttacatacgcctggaccgcctccatgcgggaaaggatgcttttcagcttgagctggcctacaaagggggaggtggcgggcagggatttgtacggttcgtttttccagtcagttttttcctgaagggcgcggagcagcagcttggccgcattgaacggcgtgctctggtccggaacagggtccggttccggagccttgtgttccgcggcctggtccatgctgatctggaagcggacgggggagccgtccggcggctggtcgccccgggagaggccgcagggcaggcagaggcagagaagggagagggggaggattttcataaccgctggccgccactatggcataaacggccgcaggtgtaaatcactcgttgagggaggaatagcggatggaaggtaaatggttgcattccgttttttcctgttctccccgcgatggtgcaaaatgagaaaatgcttatagggaacgacgaaaaagaaacttgaagaattgtttaaccagatggacgctgtacaggatgacaccggaatccggaaggatgggaagccatcggatgcccatttctcgggtaggaggaagaagctagagagcggcgcaaccgaggattcctcctgcgaatggtgtgaaggaaaagctgttccttcgttcagacttggtgaaatgaagggagatgaaaacgtaccagtcctgcagaatgatccgtatgccaagcagaagaagagcggctcccaaggtatggcagatgacattcagcatgaatttcttgttataccggattttccagtgcggcaaccgtaaagaagaaaaaggggagagtgttcgttctcttccggaaagtctccgcggcgttcatgccttgaatttttggagaggagggttttttgcatttgccaacagtgcctgggggaggttaactaatgcgcgtatgtccgaacacaaggaaagaaagactcttgaagaacgccatcagatgtctgatctggaacggctgcgccactcctgcgcgcacgttctggctacggccatttgccgcctctggccggacgcccagctggccggcggccctgccgtggataacggtttttattacgacgtggagctggaccaccgcatcagcacagaggattttgagcgcattgaggaggagatgaagaaggtggtgaaggaaaaccagcctttccagaaggaagttatttcccgcgcggaggccatgaagatggcggaatccggggaattgggcgcccttgggccgcgcaatacgccttcccagtttaaaattgacctgctgaacgacattccggaagacgaggagatttccctgttccgcaacggagattttacggacctgtgcgccggcccgcacgtgggccgtacgggcaactgcaaggcgttcaaaatcatgagcgtggcgagcgccttctacaagggagacaagaaccgtcccatgctccagcgcatttacggcacctgcttcccgaaccgcacccagcttgacgagcacctggaacggctggaggaagcgcgccgccgggaccaccgcaagctgggccgtgaactgggtctcttctgcattgacgaggccgtgggccagggcctgattctctggaagcccaaaggagccctcatccgccgctcccttcaggatttcattacgcaggagctggacaagctgggctattcccaggtgtacacccccaacatcggcaagctggacctgtaccgcacgtccggccacttcccgtattaccaggaaagccagtacgcgcccatcccggaacgggacgccatggaaaagctgagccaggaaggagcttcctgcgcggaactgttcaacgggctggctgacggcaccattgagggctacatgctcaagccgatgaactgcccgcaccacatcaagatttacgcgaatgacgcccattcctaccgggaccttcccgtgcggctggcggaatctggaaccgtgtaccgctgggaacagagcggtgagctgggcggcatgacccgcgtgcgcggctttacgcaggacgacgcccacattttctgcacgcctgaccagctggccggggaaatccgccagtgcctgggcattgtgaaaaccatcttcggcaccctgggcatgacggactaccgcgtgcgcctttccatgcgcgacccggaaagcgacaagtacgtgggctctccggaaaactgggacaaggcggaacaggccctgcgggaagccgcggaatggctgggcgcggactatagcgaggaagccggggaagccgccttttacggccccaagatcgacttcatcgtgcgcgacgccatcgggcgcgaatggcagctgggcaccgtgcaggtggactacaacctgccggaacggtttgacctacattacaccggagcggacaacaagccgcaccgccccgtgatggtgcaccgcgcgcccttcggctccatggagcgcttcacgggcctgctgattgagcactttgaagggaaattccccacctggctttcaccggaacaggtgcgcgtgctccccatctccgacaaggtgatggacgtggccgccgcgcaccgcgccgccctggccgccaggggagtgcgcgtgacggtggatgaaacgccggacaagatcggcgcgaagatccgcaacgcccgcctggaccgcgttccctacatgctggtgctcggccagcgtgaggcggaggaaggcaccgtttccgtccgccaccgggacaagggagacctgggggcgatgccctttgaacagtttgcggacgttgtggtcagggaaattgcggagcgtcatatttcccccatgatttgagttgccaagttattttatttagtttagtagtatccggacgtgccaatcaagccaacgaagaataatgatggtaatcgccgccgtgagcgcggtgatcaaacccgtgtgaatgaacgcatccgcgccccccgcgtgcgcgtggtgaccgccaacggcgaccagctcggcgtcatgaatacgcgcgacgcgctggaaaaggccaaggccctgggcctggacctggtggaagtggcgggcaatgccgatccgcccgtgtgccgcgtggtggactatggacggtacaagtaccagcagtccaagctccagaaaaacaacaagagccgcacgatcaagcttaaggaagtcaagctccgcatcgggacggacacgaacgactacaacgtgaagctggcccgtgcggaaagcttcctggaccacggccacaaggtccgtttccagctccgcttccgcggccgtgagaacgcccaccaggaacttggctatgacatgttcaacaaggtcattgcggacttgaagaccatggcgcaggtggaccaggctccgcgcctggccggcaacaccatgcacatggtgctctccccgctgcccgtccagcagcgcgtgaagaaattcaccgcccacctggatgaggactttgattcggaagattccgcctttgacgcggaagacgacgagtgaagcgcttttccctcttttttcaggctttccgccctgcagggcggaaagccttttttacggacaaatgcctttttccatggttctttcctacactgacaccaaagaattttccccggcggcgctggaggaattgttcctttccgtccaatgggaatccgggcggcatccggaacgcctggcggaagcattgctccattacgggaccgtgttttccgcctgggacggcggcaggctggcgggactgatcgccgccatggatgacggaaccatgacggcgtatgtccattacctgctggtgcatccgctgtaccaggggtgcggcgtcggctcccgcctgctggagctgtgcaaaaagcgctatgccgggtatttgaacgtggtgctcacctcctaccgcgaaggagtgcctttttacgaaaggaacggctttatcgcggaccggacgcaggaggccatgcgctttattcccccttcttccggggaaaccgggctttaacagacgcagggaggaagaagagccgcccttcctatggcatgcgcttgcggaacggctgcatgcggcacatggtggcggtgcgccacagccattccagggggccgtacaggaagcggctcagccagaggcggcaggcccaggcttgaagcaggaagacggcaacggcggcgcacaggcaagcccacggtcccatgccctgcgccagtcccagcccccacccgaagaacaggaacgtgaataccagcgtttgggagacgtagcacgtcagcgtgcattttccggtgctgctgagcagcctggatggcaggggaaggccgggatgggtgaacagcaggacggcggcggagacgaaggccgcggtataggctaggttttcccattggtgcagaaggtgtccagcgtccgttcccaacgcggagtccagccgggaggtgaggagtaggcgcgccgccagcagagccagaaacagggttccggagattccaagcatccgcagaaacaggcggcgcttgttcggagcgtccacaaagacctgccatctccccgccagcatgcccaggatgaagaggcccagcgtctgccagatgcggccgctgagcaggaagaactgccatttgcccgcctggccctgcgtcaggttccacagggccgcttccccccagctgccgtgggcgtacaggaattcacgcgaagggcctgccgccggggaggccgggtggaaccagccggaggaatgcggccacaggtccgccagtccggcgcgggacagcgtgtccatgaaggcgacgggctgcatcaggcacagcaggcagaggatgacgagaagaggcgtaccgcgtttgtacagggccaccagggcaaaacccagcacgccgaagatggtgaggatgtccccgtcataaaaaagggtgtgcgccagcccaagcaggaacaggagcgccagccgccacatgaagcgcttccggaagtcgacgcctttctgttcctgcctgtccagctggatgaagaagctgaggccaaacaggaaggagaagagaaggaaggatttgctgacgaaaaggtgttcgtaggcccagtccgccgcgctgttggccgcggcctgccatccctccgccgggggcatggggaggtacaggttgaagtggtcgtgcgcgtggacggtgacgatgcccagcagggccagcgcccggaggatgtccaggatggtgatgcgcgccgcccgggggggcgctccggcgggagtccgggcggtcatggcgtcaggaagggcgggaaagggaaggaatcagttccgccgcgcgccgcctggcccactggtccgcttccaggatgggggccagctctccgcggggatctgccggggtgtggtcgttcatgacggcttccaccagtttccagatgccggggaaggtgagttttccctgaatgaaggcgtccaccgccacttcattggcggcgttgtagacggcggccagggtgctgctgctggcgccggccctgcgcgccaggtccagggcggggaaggcgtccggacggggcgcctcgaacaccagctggcctatctccgcaaagttgagctgcttgagagagttgggaacgcggtccggccacgtgacggcgtactggatggggaagcacatgtccgagctgctcatctgggccagcaccgtgccgtcccggtattccaccatggaatgcacgatgctctgcgggtgaacgatgacgtccaccttttccatgggaacgtcaaacagccagcgggcctcaatcatttccagccccttgttgaacagggtggcggagtctatggtgattttccggcccatgctccaggtggggtgcttgagggcctgttccagcgtgacgtgctccaggtcttccttcttccaggtgcggaaggggccgccggacgccgtcagaatcaggcgggaaacggcatccggtccgccgtggctgccgttcaggcactggaagatggcgttatgttcgctgtccaccggaagcacctgcacacctgcttggcgcgccttttccatgacaatctggccggccatgaccagaatttccttgctggcgatggcgaggtccttgcctgcttcaatggcggccagtgcgggcttgaggccggcagtccccacgatggagatcagcaccatgtccgcctccggaagctgcgccaggcggcacaggccttcctcgcccgtttccacctgggcgccgggaagggcgcgcgccagcttgtccgccccggacgggtcaaaaatgcatacgttgcggacgttgaattcgcacgcctggcgggccagggcctccacgctggttccggcggccagccccacgatttccattctgtccggaatgtcccgggcgactttcagggcgctggttccgatggaaccggtggagcccaggatgacgacgcgtcgtttctgcataacggagaagcatgatgcaaaaaatacggctccttgacaagccggggagatgaaaatcttccccgcgccgcagggaccggcccctccgtcagttcggcctcattccggtgggccgggaggaaggacgccacgcatccgtgccgtaggtggcttgtgccgtgggttcgggaagctgccggaactgcatcctctgccggtcccgtctccatttccgcaggttgcgggaacgccagttccaaatgcggctttcggcatggagggcttcccgggtcatggcgtaaacgttggctccggcttccgtatcccctcccagccggcggtagacggccatggcgaaggggatgttgtcccggagttcaaagcgcggcaggtctccatcgctgaaataccagtccggctgcctgtccatcgtcatcaggttcaggtcgccgctcagttgggacggactgcggagcccggtcagggccaggaaaacaagggctgtggcgccgcagagttttccataacgcagccagtttccatgaccggccatgtagcggaagagaaggtacaggaagcaggctcccatcagcaaatagatgccggccgtgacgcggttgggagagaagccgaaatcttttatctggaaatacagcctcatgcccacgctggcggcgagcagtccggtctgcgccgccaggatgaagcccaggacgattcccgtttttgacgcccgcacggagccttccggacggaacaggaccagcagcaccagggcggaaagaaaggccgccagcatgatggagtccgccccgtcgtgcagataggcggtctgggagatgccgtcaggaacgctcccccgccataagaacgccacgtccgtgccgttgttgaccagaaaggccaggttgatgaacagcagggaaacggcggggaggtgcgggagccaggggctgcccggacgcacggggtgttgttccgggaaggaagagcgggagcgcggcatggctgcaatgccgaatgccagggctcccaggcaccacaggaggatgtccgctaccgttcccatatccggaaccagccaggagcaatagctccagaaccatttgttcatggctgttctgacagcggcgaccacagggttcccgtccgcaaagatggacaggaagaccaggaacagaatgactccgatggcgacgctgcctgcaagcggaattttccccaggacgtttgcggccgcctcttttgcctgggtcatccggaaaaatttatagccccaccaggtgacgtaccgtttggcagggtcaaagctgttgccctctttccgcggcaggaacgttatcaccacgggaagccccaggccgatgagcagattgaactgggtaaaggaagtcaggttggcgcctgccgcagcagcgttcagcacggccatgaaaacgaggaacacctgctccttccggctgaggtccgttctcagtgccagaaaggccgccgtgtacagcagaaggcccagcgcagtgccgatgcccaggccctccaatgtaccgaacatgaaatccgcggcaaagccgctggcaatcaggacaagcagcgggatgtgcccatgcctccaccaggaaggggaaagcagggactgcggatctctgcggacggaggtggggcaggaaggcggaagggatggacgctccggaaaggaagaggaaggttctgtcataggagaaaggtcggatagttgcggaacagccgcccgcacgcggggagtgaggcgctgtccgttaatgtttagccgttattgcaggagtgtcaagcagggatgtccggaaaagagcgggcctgaatggagagggcgggtccgccgcatggaaaaggattgtattttccgcaggagggcgtatagcatggcacgaatgaagcgcatcgccgtgtatgccggtagttttgaccctctgaccaatggtcacttatggatgatcaagcagggggcgaggatgtttgatgagctgattgtggccataggcgacaatccggacaagcactacacgttttcccatgaggaacgcatgaccatgctgcgggtggcgctttccgacatgccggacgtgcgcattgccgagttccacaaccgctttctggtggattttgccaacgaacacggggccacgttcatgctgcgcggcatccgttccacgcaggattatgaatatgaacgcgtgatgcgccatattaatgcggacatggctcccaaggtctgcacggtgttcctgatgcctccgcgggatacggcggaactgtcctccagcatgatcaaggggctgattggcccggaaggctgggaaagccaggtaagccgctatgtcccccacaatgtattcgccatgctgaaggagaagtaccgggaagttttcccgcgttcctagcggcttttggagccgttattcgttgtccggagagggagccggaggactggaacgcctgcgtcttctacggtccttctgccggcgcatgcgctggatgacgcgggctctcgcggcgcatcggcccgtttgcatttgttccaccgcgtcgcacagttccctgcgcgccagaaagcggttgagctcgcgggacctgtccacgtggcatttgacggcgattcccgtggggatgtgcttgagataaacgcagttgttggttttattcaccttctggccgccgcgcccgcttccgcggacaaagctttcctccagatcctgttcacggatgcccagggcttccatccgctcctggagagcggccagtttttcaggccttaccataaccggagcattgcagggtgttgacgcgctgccggaccgcatggaccagcatttcccggctggcggctgtcatggagcgcaggctgaccgcgacggttgagccgtccgtcaggcggaggttcaggcgtccgcctttccggtccgcagaacgtatctgctgccagaagcaccattgcatggcgcggcgcgcccgcaggaagggcaggatttccacgcctaccggggtgacgatgacggccgcgtgcttcaggcagcggctccccgcaatcaggcagaggacggcgggaacaagcgccgcagcctgcatggcccacaggggggcgggcaggtacggggtgatcgtatcgtaacccgtgagctggaggaaggcggcggtggcgatcagcaggaatcccgccgccagcaggacggagcccgcgcggttgcgggtgaagcgcagctccctttcccgggcgggaatgtgccggatgtcctccacgcccagcccggctttgaccgggcggggggcggaggcggaagaatggagttcaggctccggcataaacgcccgggaggatttccttcgtttcttcggaatcgttttccatcagcagcgtgccctggagaacggctccgtcctggaagtggaagcggccgcgcagggtcagcttgtccagcccgatcagggaaggcaggcccaggctgtccagggagtccaccagcttgtacagcttggagtccaggtccacaacgggagtttttccttcccgttccggagccagggccaccttgccgtcttcatccacggcgatggcgtccgaacgcagcaggagcaggtcggacgtggtcttgacggggaagaaccgggaacgcggaacgttgacggcccttgcgccggggaagcactcgatgcccgcgcccatggccgtttccagctggtacaccggggcggattccgggtcgcgggggttgagcgtcttgctgttccggatcatgggcagagggagcacgccgccgttggcgtccaggatttccttgagggcgtccaggcgtatccagagcgtgttggtattgaaatagcggtgcttggagatgttctggaattcgggaatgtccgcatccgggcactgggcaacttcccgcaggatcaagtggccgtccgccttcctgacggccaggtggccgcctttcttgtccgcctccgtgcggcgggtgacttccatgacgaagggggcgccgctctccgcaaaccagcgcaggaagttcatgtcaagctgtgcgcccagattgtcggagttggagacgaaggcgtatttgacgccgtccgccagcaggcggtccagccagccggagcccagcagcgccgggtacaggtcaccgtggccgggcgggcaccattccagttccggctgttccgggcaactggccggggcgagcccgtccgccaggattttgggaacgcggttctgcatcagctccacctgggcggggtccgcaaagccgtcagacgcgtatttctccaggtaggccagcgtatccgcgctggtggagaaggagttcatcagcagaaggcgcacgggcgtgccggagatggagcgcaggtgcttcacctgccggacgatcaagtccaggaacgtatcttcaccctttaccttcagcaggcttttcgccttctggaggcccatgctcgtgccgaggccgccgttgagcttgatgcacacgcactgggagatcaggtccttgtccgccgcgggggtggaggccgtgatgtcctgccagtcctccacctggtcggcgggctggatgtccatttccggaatcatgccggagtggttggagacgagagcttcgtaacagcgggagaaagctttgacggctgcggccggaacgccggcggactccatcttttcttcaaaaggagtgaacgtactcattggcggcttttgtacaaaatgcccgttggaggctcaagcattatcagcgtatccggcacgtccgcgcgcctttccccctgtgggggccttcggcttgtttggaagcgatcacccggatgcgccggtagtccgccacccattgggtgccgtcccacagctcgtcccgcagggccttttccatttcctcgaaaatccggacgcgccgtttttcgtggaggcacttcaggtccgcccagaagaactggcgcgcccagttgcgcaagccgtacggcccgtccttcagcggcgtggggcggtcaaagtccattaccacttccgggcgcagtcctgcctgttccagcatgctgcggtattcttccacggtggggaagtaaaaacgtgtcttgtacgggaggttcatccgctccaggctgggccggaaggcctccctgatgcggaggatgttgcggtgggccccaaattcgcagatcagttttccctgcggtttcaaggcgcgggagacggctttcaaaagagccccgtggtccggtatccaatggaaggcggcattggaaaaaatgacgtcaaaccagttgttccagggcatgaggcaggcgtccagcacgcggaagtccatgccgggataaagctgccgtgcctttccaatcatttccggggaggcgtccagcccgacgacggaggtcgatttttccagcagggcgtgcgtcagcgtaccggttccgcagcccaggtccagaatggcctggccggggttttccggcacgttggagagcaggtccctgccatattccgcgacaaaatcatgcttgttttcgtacaaatcagcgttccagtccatcactgccccatcataggaggaaagggattctttacaagaaagaccctgtcttttttcaagggattttcccgctgctgccgccaaggtccgtttctccgtgccgttccgggattctgcttgcgttggcggggttgaaatgattaagataagcttactatgaaagcaacagccctgttcatggcggcctcagccctggccgcggtttccgccggcgcctatgacggatacggttatgacccccgtcccgcaagttcctacaatgatacggtcagcggcgcggcccacatcggttatgattcccggtatgcctacaaggacgtggtggcatcctccctgctgaaccgcagcggcgtgttcaacatcggcggtgagctgaatctcaacctggcccgggactggaagcaggaaatcggcgcggaatacatggccttctgcgacggcctgctgagcgacaaggatgcctttgacgccaactggaaggccgtcaaggagctgttccccaacctgtctttccggggggggtacgaattcaattacggcggcctgccgggctatttgagcaagtacatggggaaggccccccattccgtggctcagtccgtgacggcaggcctggcgtatgacgatccgggccacggctattttggctccctggacgtgcagtacggcttttacggcatgattggctggcgtatcgacctgaacgcgggcaagcgctggagcggcctgattcatgagaaggtggacctggaattgagcgccggaaccggctattcttccagctactggggctccggcgtggccggatttgaccaggtgaacatcaagctggcggctcccgtgcgcgtaacgggcgtggatgccagccgcgggttccgcgtcattcccttcatccagctggactgggccggaaacacccgttccgaaatccgccgctacaccggcatgagcacgattgaggacttccgcatccgcgtgggcgtggaagccgtttaccgcttttaaacggaagcctccgcggccctttcctccgggcggggccgcggaggcgttcctttttctccggagccgcccggacggcctctaactcccttgaacaatcccgccatgttgaaaatgattctgctgctggcccggcgcacgtttatacggctgctgctggtgctgcttcccctgggcctctttgcgttcctggcgcaggctattcccctttccccgctgcaatccctggtcgtcctgattccggtgattgcctttgaagtgtggctcgtggtcaagtacctgctgcccgtgatgggcgatctggtgaccaagacgctgtattcctccaacatcaccacggatgaggaagtgctggtggatgccgcccggcgcatgctgaattccggggatccgcagggagccctggaactgctggagcgctaccggaaggaaaattcggggctggtgcgttcctggctcatggaatccagcctgctgaacgatatgcgccggtatgcggattccgttgaagtccttcaggaaggcctggagtccagaagatggcgcaaggaggaccgggccctgttcctgtacaagataggagtgatttatgattcccagctcaacaatccggacaaggcccggaaatactgggaggaagccgcggacaggtatcccaacacggcttacggccgttccgccctggacaagctgtaaataaccccgtgctgaagtagcggcatttgctatggaaagtttgcctggttagggctgtgtagctgaccggcagcgcatggtttttcccggctggcggagtgtctttgttcatgcggcctgttatttttcacggagcggttgctccagtaattttttaatgcgttccagaaaaaaggaaaaaagaatttcaggaaagcttccctcttttttttcttttcaggtaaaagttgtattttcaagcttctagccagagtgaaagaagctttttattgatgaaaatcaatataataaacgttgcatagctgaaaggttgcattatactgattcctcttcaatgattaaaggccgttcgatttcggcagatggtttgaattttttaaaactgattgaatatgatggaattaaaccatataaaatatatggttctctgtaagctcccttattatgggcggaaaatcatcaatcggtttatgaatggtttcaggagaagaagaaacgaatctttggcgtcaaagctggaagatatccgcaatcttctcatttacaaccatcccgtttcccaggttcctccggctacgggcaaactgaggctgcttcaggaaggcaataccgttttgctggctctttttgcgcggaagtgccgggaaaacggcctccggtactggctggattacggaacgttgctgggcgcggtgcggcacaggggctttattccgtgggacgatgatctggacgcaagcatgatgaggccggagtacgaccgccttctggaactgctgccctccctctttccgcgggaggaaggttttacctggaaaaggcatgccttcctgcaaatagggtatgagggcactcctctcaacattgacgtatacccttatcatttttattcggaaagcctcgtgtccccggaacagcacggcagcctggacaggcggcttactgcgtttaaaaaagacgtggttctggtggatggccggatgaacatgaccgatgaccagatccagcagaaaatccgccgggagattctggaaggcaaggacccggcggcggaggaggacacccccggaattttcctttccccggccatcacatttacgaaaaacactcatctgccctatgagacgttctttcccctgggatccatggagtttgaggggatgaaattctccgtgcccaaccatgcgcgccagtacctgcaatttttttatggcgattacctgtcctatccggaccgcatccagttcaagcacccttccgtaaagcgcatgatggaacatgtcccctttgagacggcggtgaaccgtttcattgacgtctacggaaagcagattgacatatcccagtcatgaaaacggttatcacctacggcactttcgacctgcttcatacggggcacgtcaatcttctgaaaagagcacgggcgctgggggaccgccttatcgtcggcgtgaccacagacagctacgaccagagccggggcaagctgaatgtgctggaaagcctggaggaacgcgtggaaaatgtccggaagaccggattggcggaccttattatcacggaggagctggaagggcagaagctgcacgacatccagaagtatggggcggatattttcgtgatcggttccgactggacgggcaagttcgattatctgcgcgaacattgcgaggtggtttacctggagcgcacgaagggcgtttcttcaaccgacctccgttccgcccggaatttcattgtccacatgggaattgccggccacgggcgcatagcgggccgttttctccaggagtccaagtacgtcagcggcattgaaataacggccgtttacggacgcgacgaggagaaggtgcgccggtttgcggaatcgtatgaactgctggaatattacacggagtatgaacggttcctggacaaggtccatgccgtttacgtggccgttccgcatcatctgcattatgaactggtcaaaagagccctcctgaaaggaaagcatgtgctgtgcgaaaagccgcttgccctttcccgggaagaggtggaagagctgttcctgctggccgcggagaggggatgcgttttactggaagcgctgaaaacggcttttttcccggctttccagcagttgataggcgtggcggaaagcggagttatcggttccatcaaggcggtggacgccgcgttcaccaaattgattgaggatgattcaagcagggagttcgatcccatgcaggccgggggggcgtggacggagctgggggcttatcccgttttcgtcatcggaaagctgctggggacggaaagccgccgcatccgcttcacgacttgcaggaagccggaaacgggcgtggacctttttacgcgggcggatttcctttatcccaatgcggcagcctccgctacggtcgccatcggagccaagcgggagggggacctgtgcgtcacgggaacgcgcggctatatttacgtgccctccccgtggtggaagacggagatatttgaggtgcgttttgaagacccccggcagaacaggaaatattttatcaggtttgagggcgacggccttcgctatgagctggccgcgtttttgcgcctgattcacggctgccgtcatgagttttccctcatgtcccgggatgattccctgttcatggctgacgtgacctgccggttccgcgaaggcggcgatgttgaagagatcaactgaacaggaaaaatgccgttcccggaccgttgaacccgcctgacggaatgagccggtgctttccggggagctgtccggtatgaaaggcctgtcttgaactgcgttgtcgtcagccgttttatgatttttcctgcaacggagaaaacctgtccagcatggaagtgttccattccacaaaggaatggagcgtgggcgacggaacgcccagtttttccgcaagacgacaaatcggcccggtgcccaggggaacgtcttccgtaaagtagcgggaggcgaagtccggcgcccagccctgttcccggaggaccatgggtgccttgactccgcggaacgccgggatggaacggattttcccggttagttccgcggcattccgggattcatagtagttcagaacaggaatgatgtccctgccgatctccatgccgggacagcgggaacaaagagccagaagttcctgatctgctcggatgtacagttcgctggcttcctccgtccattcttcatagaacagaaattgcctgtcgtagaaggttccttccctgtaatggcgaaacaggctcatgcagcgggaggggtgcagaaggggattggaattgttcagcaggaaaggccatggggaggaaaggagttccagcggagtatcaaacagagtttccagcaatgcggaccaatggccggcgtcgttcccgggggcaacccatatcctgttgagggggcggctgccgagaatagagacggaatggccatattcaagcgtacggcagatcaggggaaccttgtatattcccatcaggctgacggaggaagtccatgaggcgtcttccgccatgtccatgacgtccggagtgcccggcacgatggcgagcccctgatcacggcgcagaaagggcttgatgcgcaggcatatttcccggatgccgaaacgggggaccgccaccagcacaaggctgcattcctccagtatttccggatgattgctgattcggcccagggggggccggagcgcggttccgtccggaaaggaggcggagatggttttattccattgttcgggcttccgggtcaggatattgacgcgcaggccacgggcccccagccacccggccatggcatgggccaagttgccgccgccgcagatgcctatgatgggcgcagaagtagcgttcatgaaaaagcagtaatggagaaggatgaaaaaagggaggtttccgccagcgtggtcagatggaaagcggttccgaagcggcttccgcgtgcatggcgcgtaccagggcgtcgttatctgccttgttcctgacggcgatgcggatgaattccctaccctcaaagccctttttccggctgcaatccttgatcaggatggagtggtttttcaacaggaggcccgtgagggtacgggctttcatgggcggcattacctcgcacatgaagtagttggcctgggaggggaggacgttcaggaagggaacgcgggagagttcctgcatgaagcggtccctttcctccatgaaccggcggcatgcgcgcacgtaggattgttcatatttcccgaagatctgcatgtaaaattcggcaatggaattaatgttccagatggaaacgtccttttttatccatgcaatcagctttttgtctgcagaggccagaacccccaggcggaggcctggaacgccgtaggactttgaaatgcttttaaccaccgccaaatgggggtactcctcaaggagggtgtcccggagcaacgtgttgtccggcatgccttcagagaaatccacaaaggattcatccacgatcaggcgaatgccgcgctccttcgtccacaggcagaggcgcagcacgtcggccttcgggaggaagaagccggaaggattgcccggattgacaaggagcagggtgctgatgtccttgccggaaaagaattccatcaggtcgtccgccgtgtagctgaaattccaggaagcgggatggaagggcaccaccatatccggggccgcccggttgggatattcctcaaaggtggggtagacgacgcccattttcccttccatgcgggacatgagcgccttgatgagttccgccgcgccattgccgatgcagatgtattcctggctgacgccgaagtattttgcggccagcaggctgttgaccctcatgccggacgggtattcccgcaccaggtgctcaaagttcgccttgagttcggacatgaggcgcttgttggggaagtatggattgaccaggtagcagaaatccctgatgcgtgggtagcgccagtagccgccgtaccgggactccatcaggcgcaggtgttcctcccggtctggtgtgaacatggaagccgctatgtccagatcctggatgtcgtctatttcataccatgcttcgctgccgagacgcagggccttgatttccggtttgtccagcagggcgatgacccgcagcacctgctcgtaatattcgttgttgcccagggctttgctgtaagcggtgaggaaggggacgtagtgggtacgggagaaatccctgttgaatttgtaaatgttgacggtcttgaagtattccgtttttttcttataggagaatttgctgccgggaatgaattgcttgatgttgtcgtcttcatccagcgtgacgacggtgccgtccatccagctttcaaatttggcgacgagggccaggctgggatagggatggtggagcagggcgtcaatgacggagtcttcaaaaatcaggtcggattcaaagagcagcgtatcgtcctgaagcaggtgctccttggccaggtaaagggaataaatgttattggtggcggcataaaggggattgtccacgtattccacgggcgtggaaatgtccagaagagagatgaaggatttaagttttgctcccttgtatcccgtgacgacgacgattttctccagggaaggggaaaggttgtccagttgcctcagcattcgctcaatcagcgttaccccgttcacttgaatcatgcatttggtgttgtcctgggtgagatgccccagtctttttcccattccggccgctaaaatgatcgcctgcataaatactctaatttgtcttcagaacttaaaaagaactaagaacaatgtttaacggattgatcatccgccgtcaaagtaaaaatttctgcaaaaacatgttaatggaaagtacattggtgaaaaaggaaaagtacgtaattcattttccttccctattttcccgcttttcattgatttaacttcaaatggagatggcgatccgtttaacggatgatcaatccgcatgctatggaagttggggaaaagagaattgagggtttttttcaaaagctgcatcttggagaaaatggttttaatatacggaaatggttgtttttcattaaaaagccgcattgtttttcattgacttatggtatccggtggataaggtccgtttcaggacccccccgttgttcgcttacggaaagattgatattttcccgtattcactgcctagatttgcccaccatgagattgccttcgttcatcactgccggaagaaccggaaagctaatgaaaaataaacatctgtgggtgacggaagtacgctgctgcggcctgacggtgctttcttcaatcacggatagaaagaagcgtaccatcaggttgttcggcattccctgcgcccggttcagggtggggaaggaaaatgagcatgcacagatgagaaagctggtgaagtccaccgtccgggcggaggaagttccggcggcgtccggcgtgctgagggttgtgcagcaggccatggcattttttttgaaggaagtgggcagtattcttgaagaaaacggctaccagtactggctggatttcgggacccttctgggggcggtcaggcataaggggtttattccctgggatgatgatctggatatttccatgctgcgaagcgactatgaacgactgagggcgggcgctgccgagttgtttggttcccgcggcttttccgtcagcctggagccgtttatccagattgggctgccgggcaccttgtgcaatgtggacattttcccgtacgatgttgctcccggctcctggtctccggatgatccggaggagcgggaatggatgctgcgtaattacaaggcttctaagctgattgattatgaagctaacacgtcgcgccgttaccaaacgctgtgttcttatgaggataaaatgaagatcagggatgagttggtgatggaagggaaggagcctgtggaggatggaaacgtctgtctgggttttgaaattccctttgccggaccgtgccgccattccttccgtcatgaatggatgtttcccctgtccagcgtcctgtttgaaggaaagacttttcccgggccccgggtgcctgaaatggttttatacgggcaatatggagactggggtgtccttcctgattcgccgcctgtgcattttgacctgaaccggatttccaaggaagtgctgctcaggatgctgtacatgcgggataccgggcgtttgccggaatgtgactaggggcgcatgggaggagctgcgtggttccggcgttccgccgtggcgtattctccggaaagaaggtgttcctgacgctgcgggcgcaggacatgcgcggggaggcccggaagaacgtctttctccttgaccctgctgattggggcggagtatcatcggataatgagaagacccccgattcccggtttggtgatggcggacggctggctccagccgtattcccgccagatacgcgaccgccagcgtttgtttgacctgaaaatgaaaaggatcagccagcgttccggctctctggaggggtatgcgcaggggtaccgctattacggcttcaaccgtgatccggagacgggggcatggacgtaccgggaatgggcgcccgccgcccgcggactgttcctggcgggggatttcaacggctgggaccgggagagccacccgctggtgcggaatgagcgcggcgtgtgggagataacgctgccgcctgacgcgctggcccacgggcagaaggtgaaggtgcacgtgatcggcgcggacggcacggggaaggaccgtattcccgcgtggatcaccagggccgtgcaggaccccgccacttatgattttgccggggagatatggatgccggagcacccctatgaatggaggaacaacggctttgacccttcccggatagaggtgccgttcgtttacgaggcgcatgtgggcatgggcggggaagagcagcgcgtgcatacgtaccgggagtttgcggatgaagttctcccccgcatttccaaactgggctacaataccgtccagttgatggccgtccaggagcatccctattatggctccttcggctatcacgtttcctcctttttcgctccttcctcccgtttcggcacgccggaggatctgaagtacctgattgaccaggcgcacggcctgaacatcgccgtgctgctggatgtggtgcattcccatgccgtgaagaatgaggcggaaggtctgaataattttgacggttccggaggcatgtatttcctgcccggggagcgcggccatcatccggactgggattcctgctgctttgactatgggcgggacgaggtgattgagttcctgctgtccaatgtccgctggtggctggaggagttccgctttgacgggttccgctttgacggcgtgacgtccatgctgtatttccaccggggccacgagccgttcggggatttgggcgcgtacttcgggccgtccgtggacctggacgccgtggcttatttgcagctggcctccacgctgatccagcgggtaagaccgggcgccgtcgcgattgcggaggacatgtccggcatgccggggctgtgccgcccggtggatgaagggggcctgggcttttcccatcggctggccatgggcattcccgattactggatcaagctgctcaaggagaagaaggacgaggaatggagcatgggcgacatgtggcatacgctgaccaacaggcgttacggcgagccgcacgtggcttactgcgagagccatgaccaggccctggtgggggacaagaccctggcgttccgcctgatggatgcggagatgtactggaagatggccgtggaccagcagagccttgttgttgaccgcggcatggcgctgcacaagatgatccgcctggtgacgctggctaccgggggggaaggctggctgaatttcatgggcaacgagttcgggcatccggaatggattgattttccgcgtgaaggcaacggctggtcttacgagcactgccgccgccagtggtccctggtggataatccgtccctcaggttcaagttcctgaatgcctttgaccaggccatggtccgcctggccctggatgcacggctgctgaacaatccgccgccgttcccgctgaatattgacgaaaacaaccaggtcatggcgttccaccgcggcggcctgctgtttgtgttcaactggtccggagacagggcgatcatggattacgtgctgcccgctccccagaagggggaatggagggtcgtgctggatacggacggcgcccgcttcggcggctttggaaggcaggacgattccatgccgcattttacggatgaagacgggaatctttccctgtacctgctgccgcgtacggccctggtcctgaaaagggtgggttccgccgtcatggcccggcacctggggcaggaggaaggatagccattaccgcgaaaaaccggcgtatcaaggccggatgcggagaggacccaaagggggcgcgcggcacgtgccgcgcgcgtcagggaaggaatggagccgtgcccggggagaggcatggccgggaggccgttaccactgtgcgggcagttccctcaggggcggcgctccggagtccgcctttttcaggcgaatggtcagggtgtccgtcttgaagtcttttgacttttcgttgttgcggccccacaggatggccccctgcgtggtcatctccggataaaaggttttttccgtggaaaggaagccgggcttgtccgccgccacgtgcacggacttgtgcctgttcagggagagcgtgacgggtgcctgccccgcatagtctccgttcacgcgcaggctggccccggaagggacactgcggatagtgatgtccctggaagagctgctgcatgagaggcacgcgcaacaggccgcggagagaaggaagagatgcgggagaaggccgtgggtcatcataccggaaaaatcaatggtgttccaccatgttcatggcggcctgcttgatctgggcggccatggagttgagggcgttcgccctggtgggcgccagatggtccttcaggccggtcctgtccagcttggacatgtccgctttcaggatttcttccgggggaaggccggagagcagccggatgaagacggcaatgaggcccttggtgatgagggagtcgctgtccgcgtagagcttcagcacgcccttgtccggctccgtgtacagccacacgcgggactggcagcccttgatgagggagtcctccgtcttgtgggcttcgtccagctttggaagcttcttgcccaggctgatgatgtattcgtagcgttccgtccagtcctggaacaggtccagttcatccagcaggtcttgcaggcgttcttcgtagttcatggctcggatttggtgggaaaggccggttatgcccggttggcgtccgccagcgtggcgagaacggctttctgggcgtggaccctgttttccgcttcacggaagatgacgggggcgaagtgttccagcacgtcttccgtgatttccttgccgcggtaggcgggcaggcagtggaaggcggagtggttgggggcggcgtgttccagcagctccctgttcacctggtaggggtagaagtgtttttccttggacaggccttccgcttcctggcccatggagagccagacgtccgtgttgatgacggaggctcccttcacggcttccacggggtccgtggtgaagatgacgttctcgcagtccagatgcttgcggaagtcttccagcggcaggtagttggtcggcgcgccgatggcgagcgtgaagcccagccgcttggccgcccacatccaggagcgggacatgttgttgtccccgtcccctacgaaggcgatcttcatgtccttccaggagccggggccgtaaatttcctcaatggtgagcaggtccgccaggatctggcaggggtgttcctcgtccgtcagggcattgatggtgggaatgccggagaagccggcgaattcctccacttcctgctggccgtaagtccggatggcggccccgtggatcatgcggcccagcacgcgggccgtgtccttgatgggttctccgcgcccgagctggatgtcatggacggaaaggaacatggggcgtccgcccagttcgctgatgcccacttcaaaggaaacgcgggtgcgggtggaggatttggagaaaataagcgcccaggtctggcctttcaggggcaggcgttcgtgatggccgcgttccgccttgagcttgtggcccagcgcgagcaggtccttgatttcgtctccggtaagctgttcgatggaaagaaggtttttcatgatattgtaaagagaatggagaaagggaataaaaacaggaaagccgcaccatactccctgtttccttaaaagaaaagggaataatgcggctttccggggaggggtggagatgcctttacagcctggccgccgcctggtccggccacggcacgggggagccttcccgggctccggcggggttgtctttcttgtaggtgggcatctgggccttgcggtccttgagcagggcggtcatggtttttgccatggctttcacgcggtccggatgccgttccgccaggttgtgctcctcgctgatgtcttccttgatgttgaagagttcgaacttctgggtggggtgccagtaaatcagcttccagtccccctggcgcatggccgtgctgggggaataaagcgagttgttgccgttcccctccccccagacgttgggcgtatggaagagcagggggcggttggggttcattttgccgcccttcagcagggtgacgaagcttttgccatccacgacctgcggagcctggatttttttggctcccgccatttccagaatggtcgggaagaagtcttcaatgatgacgggagtggtgcagacgctttccggcttggtgactccgggccagtaaacgatcatcggctcccggatgccgccttcccggttggagcccttgccgaagctcagcgggtagttggattccttgttgcccatgcgcccgctgatggcgaggccgccgttgtccgccatgaagatgatgacggtgtttttatccagattgttcttttccaggtactgccggatgtcgcccaggctcttgtccatcccctggatcagggcggagtagcgtttttcgttatcggaccagttgtggccgtcgttcgggttggagtagtcttccgcaaagcgcttgtcatagccgcgcatgtcgaagggggcgtggatggcgtaatgggacatgtacaggtagaagggcttgtccgcctccttggggttgttcctgatggcgtccaggcgtttcagcacctcctgcgtcagggcctctgtcaggaagacgtcgttttcataatagttgttctcatccaggccgcggacgtggaagttacccgtgccgtatttctgggagccccggtagtccgccgggccgccgatttccgtgccggcgatgttgtagtcaaagccgaagagtttgggattggcccccggggtatttttggagccaaagtgggccttcccgcagtggatggtggtatagccctgttttttgagcagggcgggcagccccagcaccggggtaaagggcttttccatcttgtactggattttctcttccgtcagggggagaagggtggtgccggaagatttggtgcccagcggctgcacgccgttgatgctccagtccgcaggagctttgagcgccttgtggccggcatccgtggtctggtcccgcaggagcgtccagttggtgacgcggtgccgggcggagttcatgccggagatgaggctgcaccggctgggggaacagatgggctgcgcataggcgttcgtgaagaccatgccctgcttgcccagggcctccatgttgggcgtgcggtagcgcttgttcaggaaggtgggcttgggcgtgccgtccgcttccctccagaagggcagggatgtatcctgccagcccatgtcgtccaccaggaaaaggatgatgttggggcgcttctgggcttccgcgcggggcgcgtttgagggtgctgcggaagcggacagggcgcttcccagcaggaacgggatgagagaaaatgcaatgcggaaagttttcatgataaaaagaccagtactcatataacgcatgaaacgggctattctgtcaaggattcgtgttcccgcggcagtttgccggggataagagccgttttttccggtacggcatgcgccggaagggaaggccttattcaaacagggccggataggatttccgtgccagagccgtgctcaggtccacgatggtcctgctgttgggcgcctgaagcgccttctgcgccatgtcccggcactggccgtagtccaggttgcggatggcgtaccggatgatggggaccagatgcacgcccacggacatggaggtggcgcccagcccgatcagcaggggaagcagggtgatgtcccccgccatttccccgcagatggccgtggggacgttttcccgttctccggcggtgatcgtcatgccgatgatgcgcaccacggcggggtgcgtggggcggaacatgttggcgacgcggttgttgaccctgtccacggcgatggtgtactgcgtgaggtcgttcgtgcctacggagaagaagtccacctcccgggcgagcacgtccgtcatgatggcggcgctgggcacttcaatcatgatgcccaccttcaggtcccgcgcgtagggaacgtttttcttttccagttcctcccggcattcctgaaggatgtgcttggcggtgaccacctccgtatagccggagatcatcgggaacatgatgccgcagccgggcgtgtccgcgcaggcgcggagaatggcgcggagctgctgcttgaagagctccggacggctgagggagacgcggatgccgcgccagcccaggaagggattaggttccggcgtacagagccgttcgcacggcagcttgtcgccgccggagtccagcgtgcggaagatgacgccgtggggcgcgcagccttccgccagcttcttgtagtagcgtgtctgttcctcctcgtccggcatgccggctggattgcccagcaggaagaattccgtgcggaagagtcccacgccttccgcccccacctccttgatgccggagtattcatgggggaattccacgttgacggaaaggcggatgttgcggccgtccctggtgatggtaggcaggtcccgcagcgcttccagcgccttgtaggccttttccttttccacctggaggcggttgtagtactccaccgtctcctgcgtgggcttcaggatgagcactcccttgtagccgtccaggatggcgggggcgtggctttccacccgcaggagggcctggtccagtccaacgacggcgggaatgcccatggagcgggcgaggatggcggtgtgggaaacggaggagcctatttccgtggcaaagccgtgaatcaggctggcgtccatggccgccgtgtcggaaggggtcaggtcataggccaccagcacctgggcttcctccgcctcttcctcgtcttccaggggttccgtgctgcggaggttgttgatgacccgctgcatgacgtcctccatgtccgcggtcttggcgcgcaggtaggggtcgtccacgcggcgcaggacttccatgtagttctgcatgaccacataaaagatgtgctccacgttctggaggcgcttgagcagctccgtctgaacctgctggaggatgaccttgtcctgaagaagaaggatgtgggcgtcaaagatggaggcgtccttttccccggatatctggatcatgcgctcacgcagcgtccggatctgatccgcggtggtttgcagcgcctggtggaagcgcaccaattcggcatccacctcctccggggaaatttcatacgccacgggttccttggaaccgctgatctgaatttcgatcttgcccagggcgatgccgggggaaacgggaatgccctgaagccaggtttcttccgtggaaatgggttcctgaatcatctgcgggcttgatggcccggtctcatatggccgtgagccggagtgttcaatcttcttcaaacttgcgggaaatcaggtcttccagcgcgttcaacgcttcctgctcatcctttccttccgccgtgatggtgatcttggagccgtggcctaccgccagcatcatcaagcccagaatactctttccatcaacttcctcgccatccttctccacgacaatgtctgcatcaaatttactggccagtttgacgaattgagcagccggacgcgcgtgaatgccgagtttgttgatgatggtgagttccttggtaaccatggaatttgaagtaaggggtgataacggttgctagaacggtaagtacactaattgaagtttttttccaagagttttttgtcagtcctggttttcagggggctggaagtttgacatgaggcggcggttgaactccccggccatgtcgatgcccatgtccttgagatggtagtccatggcggccacttccaccaggcgggcgatgtccctgccgggggctacggagagctgcacgtggagcactttttccccgagaacgtccaggccctccctttccagccccagcctgtccagcgcttcctggtccttggcgggaatgagggtgacgatgaggtccagccgcttgttgtggcggatggatttgaggccgaagagggtggtgatgttgacgatgcccagcccgcgcacttccatgaagccgcggctcatctccggcgcgctggccaccagttctccgcccacgttgcgcacgtacaccatgtcgtccgccactagggccgccccgcgttcaatcaggcccagggccgtttcactcttgcccacgccgctcttgccgcggatgaggacgcccacgccgcgcacgtccaccatgcagccgtgcagggtgaggctttccgcgaattcgttttccagaatgatagtggcggagttgacgaatttcatggtcaccaggctcgtgcggaagacgcagacgccggcctcgtccgccagctccacgatttcctggggcgggtcctggtcacgggagaagacgatgcccggcacctcgcaccggaacatgcgctggatgcgggatttgcgcatgccctccggcagtttttgaaggtaggccagctccgcggagccgaagacctggatacgcttgttggcaaagtaggagtaaaagccggcgatcgccagcccggggcggttgagggcgggttcgcaaatgtggcggctgaggccggcggggctgttgatgagctccagttggagggcttccttgtatttgccgtaaaatttggacagggtgacgaaatccactttcttcactttggatttgctgaacataatcctatataaaggaacaaatctcgcgcgagggcaatcaaatattgttcccggacccgcgggcaagcctcatttttttgaaaaaaggcccgttccggcgcggaatgccacactttaccggttgatttgaagcctcaggcgtggtctgatggcgccatgaacagactggatcaattggcaaccttgttgagattccccagcatttccgcccagaaggaacacgcccaggacgtgagcgactgcgcggactggctggtggacaagctgtccggcatggggctggaagccgcggcccacaagacgcgcctccatcccattgtgatggcccgcagcccgcgggaggaaggcaagccaaccgtgctgatttacggccattatgacgtgcagcccgtggacccggttgagctgtgggagtccgacccgtttgaaccggaagtgcgggacgggaagatttacgcccgcggcgccacggataacaaggggcagttgttcgcccatattctgggcgtggaggaattgctccgccagaacggcggccaccttccggtgaacgtgatcttcctgctggaaggggaggaggaagtgggcagcggcagtctttcccaattcatcaaggaccacagggacgaactggcctgcgacgtgattgtggtttccgataccgggatggccgctccggacacaccgacgttttcctatggcctgcgcggcctggccggggcggaaattatcgtgaagggcccttccgcggaccttcattccggcgtgttcggcggcgcggtagccaaccccattgcggccctggcggaaataatcacttccttccatgacgaggacggccgcgtggccgtgagaggtttttacgatggcgtggaacccatcgccacgtgggagcgcagcatgtgggccaccgtgcccggcatgagcaatgaagagctggcgaagctgacgggcgtggaaaccgtggtgacggaatcgggcttcaccggggcggaatgcattttcgcccgtcctacgctggaaatcaacggcatcggaggcggctaccagggagagggaagcaagacgatcattcccagccatgcctttgccaagatttcctgccgcctggttcccggccagcagccggaaaagattgaaacgctgctggaagaacatgtgaagagccatgtccccaggggcgtcacggtggaattcaagcggggccacggcggaaacgcctacgtgtgcgacccgaattccgagttcggcctggctgcccagcaggcgctggaagaggcctttggccgcaagcccgtgctggtgagggagggcggcagcatcccgatcattgaggaaatgaagcgcgtgctgggagcggacgccctgatgctgggcatgtgcctgccggatgcgcgcatccactcccccaatgaaaacttcccggtggacctgttctccaagggaatcgacatgagccagattcttctgcgccgcctggggcagatcaagcattgaccgcgttcttatggaccagcctgccgccgctgaaatcgtcaacctgcacaagaccttcaagacaggtcttggcaagcccgtggtgcatgccgtgcgggggatagacatgagcatccggcagggagaggtatacggcctcattggtccgaacggctccggcaagtccaccctgatgaaggccctgctggggctggtgaggcccacggaggggtcgtgcgccatcttcggcaaatccagcctgtccccggacagcaaggaggaggtaggctttctgccggaaaacccctacttctacaaattcctgacaggggcggaaaccgtctccttttacggcaagctgtgcggcctgagcggcaaatccctgaaagagaaagtccgtgaactgctggacctggtggggctggccgacgcggcggacaggcggctgggcggctattccaagggaatgctccagcgcgtcggcatggcgcaggctctggttcagtctccgcgcctgctggtgctggacgaaccgaccgccggcgtagaccccctcggttcccgcgacatccggaacattattgagaacctgaaggcgcgcggcctaaccgttttcctgtgctcccacctgctggaacaggttcaggaggtttgcgaccgggtgggcgtcatctttaaagggctgctcattgcggagggttccatgaacgagctgacacgggattccgacaagcaggaaatcctgctggagcatgcctccccggagctgctggaacagttgcaggagctggtgagggaagacggccgcgccgcatggctggaagccggacacccgcgcaactcattggaaagcgtatttttaaagagcctgttggaatggaaggaaaagcaccccaatccggaaccgtgagcggtccggcggcttccaagagggaagtgcgccgcatgatacgtgaaaggataggcggattggacgccgccgcccgggaagccatgtcccgttccatctgccgccatgtggcggcgctggtacgggaaaagaatttccggcgcgtggctgtttttgccgccaggccgggggaagtggatttgctgcccctgctggacatgctgccggaccgggaatggtacttcccgctggtgcatgagggaaggacgctgagcttccaccgcgtatgccaccacggggagtttgtgacgggctgctgggacattcgcgaacccggcccgggttgcccggaactgcatgcgggagaaatggatttgattgttctgccgggagccgcgtttacgcgggacggcaagcggctggggtacggcggtggattttatgatacgctgctggcgggaccggctgcgggagtttccctggcgggagtctgcttcccctgccagcttctggacgacctgcccatggaagcccatgacaggcatgtggacatggtgattacgccggacgcggagtgatgcttgatggaaagcgggtgcgtttccgcggcagggaacaggaagccgcgtctccggacgaaaaggaaaggggctagatgcggaaccggtgtttctgcacggtcagtttatagaacaggtcgtagcgggcattcagcaggggctggagatgttccacgccgccggccacctggccgcggatgtccgcgtacagtttgcggtaatcggaaaggccgctgaccatggcttcatacaggggcgtccgcaggccgcattctacggcaatgtgcatttccgccgccgcggctacaatctggcgcgacagccggaactgcatccaggccagccccaggttgccgcccacccagacggccagggccgcggctacgcaggcaaaccccgccgcatgttctccgaagcaccccagcagggctcccagaatcaccaggatgagcatcagcttgatttccgttctcatcacgtcctcctggtccagaaacagcttgctgaggcacggcttgatgccgaaatccttcaggggcatgtaaatggaacggcccaggcgctccttgtacacctccaggtccgcctggagccgcgcggcgggaaaatcgcctatgtcgcagtcccactgttccttcacgcgggggcgcacatggttccagtgcgtctggcagatgttcaggaattccttgttgtaatacgcgtgccgttcctcaatgccggacttgaccagctcataaaaccattcgtcaatgacgggaggaagcttgtgcaggatcatcgtgcgccggatggaaaggaagcgccccatctgccgggccgattttttccccagccgcggcacgcagtcctgtacgtactgggcgtacgccttgagccgtgcgggcatttcatcctccatctggagctggatgcggtctatctcccggtcaatggaggtcaggaagccggaatccatcttggaaaggcggtgcagttcattgagcacctttccctgttcttccagcaggcggtccgtagccagcagcaggcgttccacgcgcttgtccgtcagcgggctgcgtttcagcacctcctgcacgcatgttctcagcgcttccacgccttccccagcctgctccccggcggtcgtgacggggtacaggggaagttgcacgcccaggcgttcgcgggaggtggagcgcaattcctctttcagggactggagctggtcaaaggatagcagctccgcgtgggtgatgacgagcaccatgcgggaatggagccgttcctccagcgtccggaggtagtcccataaagggggctggttgccgtccctggcggaaatgaccacaagaatggcgtccgatttggggacgatgtgtttcagcttccggggggcgtcctcctgttccaggccgatggtgtcccagaactcaaggttcagcagggcgtccgacgggtaaaaaaggtccagcacccattcatgggtgtggggagcggggtggggcctgtactgccagcggaccagtgtggcttcgctggaaacgcgggaacagaaccgttctccggccagggcgtccagcgtggaagacttgccggaacccgtcatgccgatcacggtgacgttctgcggagagcagcattccgccagggcttcctccacgttttcctgggagtcaaaatgacggtccgggccaatgcgggcggaaaatgccgcggcggcatccgctacgtcccgcaccgcatgcggaatcacgttttttcctcctgtcagcatggggtgttgaaatcaaggctccgtccgggccgttccgttattccggaacaaacgtacacgccgcttttccttctgtccaactaaaatcacggggccggagcgtaggagcggccgccgaaaatggcggtgcccacgcggacgagggtggcgccctcctccacagccgtttcaaagtcatggctcatgcccatggaaagctccctcagcggggctccccccttgccggacagggtttccttcagctcccggaggcggcggaaataagggcgcgcttcgtccggattttccaccgggggagggatgcacatgaggccggctatttcaaggtggtccagcgcggccagctccggccattcccgttccagagtctccggggaaaagccgaatttgctgtcttcatcccctacgttcacttccagcaggatgcgggggcgtttgcccgtctcctgcgctacggcgtccatgaactgcgccaggcgcagggagtccacggcgtggatcagcgtgaaatgttccagggccttgcgcaccttgttgcgctgcagggggccgatgaggtgccattccgtatccggaggaagagcggggatttttcccagggcctcctgaaccctgttttctccgaaaatgcgctggcccgcatcgtagcacgccttcacgtcatccacaggaaaggttttgctgacggcgacgaggcgggcggaccccgccggacgcccggcacggagttccgcggagcggatgcgggagagaatgtgttccagattctgttggatgctcatgatggatggttcaattcagggaaggctgtgcgggcgcgtggctcatgatgtggtgcaggggggagaggcgccgcatggccatggcccataccttggaggagtccggctccaggcagatgtccggcacggtgggggagacgtaccaggcgcggtcgttcagctcccggcgcaactgggagggcgtccaggcgctgtggcccacgtaggcgcgcaggatggcgtggggatcctcaatgtattccagggcctgttcctcctgtagatggaactggacgcgcaatttgtcctccgtacggacgaaggcggcgaaaatgagctggttgcgctccacggggcctcccttgaagatgggaacggggtaaagggattccggaatgtccgtatggcgcgccacttctcccacgttcatgccggccggatggttcaggatgtggcctatgacgaattcctcctccacccggctcagaaaaatcacggagtggtaaaagccgccgccgtccagatagggggcggaaaccagaaggtggcccgccaggttttcattgctgatatcttcatgttccatcatggccataagtctacgttaacaaatgtgacggacgcaggcaaccatgcgttcaaacagccatgtcaggaggcggaggaacgggaatgccggaagaatggcggggaaggtcggttcagccgagggtgtaacgggtccccctggcggaacgggcggcggctttggagctcttcactgtcttgcggactgccgtccgcttgtggggagaggctttcttcccggcggccgcggtctgcttgcgggaaagggctacggcgggaggacgggatgcccggcggcggtgggaaatgatggaagccgtgttggcattctccatgaaagacggtgcggaagccatgaccagcagggaggaatcctgcgttttttccgcctgggccagagctttcagggaagcgtctatggagcagcgttcgatcacgacgggatccccggtccggagcaggttgaaggcttcgtacacgtcattgcttttcatccgcacgcagccgtaggaggcgggcgtgccgatggtgcgttcctctgccgttccgtggatgtaaatcaggcgggagtgggcgttccggttgcggccttccagcccttccagccacatgatgcgggtgacgatggggtcgcggcccggagaattgggggccacgcattccccggtgggcttgcggcttttaaacaccatgcccttgggctgtccggtgccgatcttggaggcgatgcggtgggcgcccagcggagtgcggcagctccccttcctgtcgcccagaccgaatttggaagtgctgatggggtaggtttttacgacgtgtccgttgcgcatgacggccattttctggtccctgacgctaacgacggcgccatccttgacgatggcggtgggctggtagtccggacgggagcaggataccaaggcgccgaacaccgcgaaggcggcgccggcgagttgaatcaggcgtactgcttgcgagagaggcgcaggcatgggaaaggtgtcagttcttggctttggcagtttgtttggcgggcagcaggttggagatcatgcggcccagggagcagaaccccgtgtagtagaatcccaggaagggaatcatcaggatgggggaaaggtaatggccctggcggatcatgatgatgatcaggttcaggaagaaggtgccgcaggcgatttccaggacggggatgacgacggacttgatggccctgtacccgttgcgcttgagctgggagacatgctgcctgttttccttctggtccaccccgtacttgggcgtgcggacgaaggcggactgatggccgaagatggcttccagaacggccttggcgttgttcaccgccatgcccacgctcagcgtgaggagaagcggcaggtagggcagctccttccaccaggatttggggcgcaccacgatctgggcgctcatgtagaagatgcagacggccacgctggtcatgaagaacagggccacgttcacgaaccacatgaagaccgtttcattttccgggatgcgctgggtgcagatggggtacaccaggaagcagagcagggccaggagcaggtaggaataattgcaggtaaggtgcgtggtggcctccaccttggccttgaggggagccttggagcgccagatgtccagcaggattttctggcagacctggatggagcccttggtccagcggtgctgctgggacttgaacccgtccatgtccacggggagttccgccggggtgacgacatcgttcaggtaaatgaagcgccagcccttgagctggacgcggtaggaaaggtccatgtcttccgtcagggtgtcatgggaccagccgcccgcatccccgatcacgcacttgcgccacatgccggcggtgccgttgaaggtgaagaaacgcccggaacggttgcgcgccgtctgctccatggcgaagtggccgtccaggtacatgccctgcacgcgggtgagaaggttgtattcccggttgatatggccccagcgggtctggacgaggcccacgccttcatccgtgaagaaatggatggttttttgcagaaggtccggttccggaacgaagtcggcgtccagaatcagcaggaattcgcccttggccaccttggtggccgcttccagcgcgccggccttgaagcccgtgcggtccgtgcggtggatgcagacggcgtcaaagccgcgggccttcagttcctccaccttgcggtagcactgttccgtggtgtcgtctgtggaatcgtccagaatctggatttccagcttgtcctgaggataatccagagcggctacggattccagaaggcggtccacgacgaacttctcattgaacatggggagctggaccgtaacgacgggcagttcctggaagcgggacttgggctggggcttgttgttgcggttcttccagtacaggtaaacgatgctcaggcggtgaaagccgtatccggctaggccgacgagaaccagaagatagcacaggagccagataaaattgtaatttaaagacatgcggggcttgcaaagggtgtttggtatctttttgcgtcaggcgcgggggatttccttgacgtgacgcccgtataagacaccatagggcgagagtcaagacatattccgttttgcttaacctttttgagtgttgttatgaagagattgtatgtgctggcagcggctgtatccgtcacggggggaatggcgtttgccgccccgaaggaaaatgccccggagaaggaggaagccgtactggatgtgcagacgccgccgcccggcaagcaggacaggcagggtcagccggccattccggaacgcctgctggacgactcccacatgaatgaggagctgggcatcaacgaatttaccgcgccgtccatccgcaagatttttgaagacctggaagggctgccggaaattccggagaacgtggcgctgcgcgcgcgtcccgaacgcccccccatggaccgctgctccctggctctccagcttggcggcatgatggcggacggctttgtgatcgtgcagtgcggcaagatgaacgaagtgaagcccattgcgctggacctctccagctatgcgaaggccatcggagccggggaacgggtgaaccgccatgccgccagcctgctgaaaaatgcggaagacggggatttgagcagtttcaagaataatctggccctgattcagtccgacgtggaacaggagcttgcctccctgcgggattccgacatggcgaacctgattggcctgggaggatggatacgcgccctggatgccgctaccgcggcgctggataacaagtttgcggaggacaaggcgaaggtcatcttccagccggacgtgccggaatacttccattacatcctggacggggtggagccggaaatgaaggaacgccgggacattgcaaaaatcatgaaccttctgacgaccttgcaggagcagatgacgctggctccggacgccaagcccaccaaggcgggcgtggaagccatccgcaagacgacgctggagctgatgaaggcggccctggctcccgtggaatcataattcctctccggttcccgtatggttctccccctcctgaccagcctggaagtgcggctcacgccgcgcagcctgtattcacgggatgaaaagctggagcggctggtccgtgacgacgggcgcattcccgtgccctacaatgtgagcatccgcaatacgggggaaggcgccgtgcgcatcatcggtaaaaagtggaccgtccgttcccatgaagacggcacgcaggtgattgaaggggatgaactgttcggttcccgccccctgttgtgccaggggcagatatttgcgttcaacggcctccagatgctgcgccttcctgcgcgcatccagttaactcttcttgtgcgtgacgaggccgggattctttatcatacggaccctgtcagccttaaatggtgaaataaaaaagccctgcatgaaattgcagggcttttttatagcgattaatgatgagagatcagagagtagggaaagaatgagcggaccaatgtccggaagttgaaataattaatctctactcactactctctactcaccgccatcggcttagccttcttcgtcatccccgtggttgaggatgaagttcaggtcgtcaatgcccaggctggaggtgaagccctcgtcacccagcacgttggcgacgagctggttcttctgatgctggaggatgcggattttttcttccacggagtccttcgtcagcaggcggtaggcgatcaccttgttcttctggccgatgcggtgcgtacggtcaatggcctggctttccacagccgggttccaccacggatcatacaggaccacgtaggaggcggaagtaaggttgaggccggcgcccccggctttcagggaaagcaggaagacggacgggtccttggtagtctggaatttttcaatttccccgcggcggtccttggtctggccggtaaggtagttaagcggcctgttttccgcttccagccggttcttgataatttccagcatggagacgaactgggagaagacgagcaccttgtgcccttcctcccggagctggtccagcaggtagaacagggcggtcatcttggcgctgtcttccttggcgtacttggggtccaccaagccggggtggcagcagatctggcgcaggcgcatgaggccctgcaggatggcgaagctgtttttcttgacggattcgtctgaatccaggccgagcagggcctgctggatgcggcggagttccgccttgtacagctggctctggatgccttccatcttggcgtacacttcttcttccgtcctggggggcaggtccttcgccacctgtgatttggtgcggcgcagcaggaagggtttcaggcgcgcggccaggcggttctggctctgcgggtccttgcgcttgtcaaagcgcttcttgaagtaggaacgggaaccgagaacgccgggcatggagaaggccatgagggaccacatgtccagcaggcggttttcaatgggcgtgccggaaaggaccaggcggttgtaggagacgatttcacgggcggccttggccgccttggagtccgggttcttgatctgctggccttcgtccaggatgaccgtgagccacttgatctggttgagggtttctccgcagacgcggagctgggcgtagttgaccacgaccatatcgtaattcttccggatgtcgtccagattggcctgatccttgctgcggatgacgagtacgcgcacgccgggagcgaatttctccgtttccccggcccagacatccagcacggacttggggcagacgatgagtaccggaggaacggcgattttcttcttggatttgtttttgcgcgcgaattcctcacgcagccagagcacgtaagtgatggattggatggttttgcccaaacccatgtcgtccgccagaatgccgccgaagccgttcgtggccagataggccaggaagtggaagccgtccacctggtacgggcgcagggtggcctgaagctgggagggaacgtccggcttgacatcgatcttgatttccgcggtgcggtccttgatgcgtttccaggccttcgggtcgaacacttccgcggccttcgggtccgcaagctgcatggcgtgcatgcggtgggtttccccggaaaggtcgaaggggtccaggcccaggcgggtgacggcgtcgcgctggtcgttgtccagcttgatttccaggcgcatccagcctccgtcgtccatacggacgtagccgcctctggcggcgaccagggcgcggatttgttccttggaaagctggacgccttccacgtcaatgacgatgcggaggtcaaaccagtcaatctcctggttaactacttcaaaccgcacggcggcggccaccgggtccgccagcagcgtcttgagcttgtcatccatgttgacggtcagctcttccgggagctgcttggcccactccgcaaatttttcagggaactgccgggtaacgcgggccttgaaggcgcctacctggggatcataggagaagcccatttcttccagcaggccgggaatgggatagaggtgctcccggatgaagcgcagcagggctttgtttttcatgggctcctggtgagcgacgtcccagccgtccttgccgagtttttccgtgcggtagccggaagcgtccctggcgcttacttcacaaagcacgtgttccgtttccgcggaggtgaggccgcggacgatcttcatgtcaaaggtgccgcgcaggtcgatgtccaccacgcggtcctccatgctggggggcagggaagcgccgatcttacggaggaactccaccccttcaaggctgtcgatgacctgcttgggaatggaatagcggggttccacttccgtgctctccagccagcgggggggacccggaaacacggtttcgtcagactggtacagctcctgctggccgggaagctggcggacggagtgggagacgttgatgccggtggacgtggcgagctggagggcgtagcagtccggctcaatggggtcgtcctggcaaatccacttgagcggttcgtccaccaccttgaaataattttcatccaggttcaccaggtagcctttcagggcgggctggtggaaaagcttgttcatcagggcgcacgcggcttcctggtccaggtccagcgtcagggcgtcttctgcacgggcgtaatcggacagggacacaaggaggatttccgtctgggcatccatgcgcacggcagcgcgttcatgcaggttttccagatgttccaaatcctgcttttcccggacgggaatccagtcctgcttcagggaatggcggtattcgaaatggccctcgttgatggtggaaacgagcctcatgaacagctctccgcggggcggctgcgggggccgttcattcacggactggatgcggtcataccaggtgcctacttcacgggaacgctcccattcgtgaatcttgcgctgaactttttccagatccgtgatggattccatgaattccgggtagggcaggcgcctcttgttgaaggcataggcgatgtaattccagaattcaaggatgttcgtgggaggcacgggccacagctccagcgggtcatagctgacgatttcccagcggggattcaggcgcaccatgtcatggtcatggatttcctgctcaatggcgaaacggcggtagcgcttctccagcttgctgacgtaatccgcttccttgtcatccagttcgcggcccagcttctcttccagaatatccagcaggggaacgtcgttaagttcgttcggggactccggaagatcctggccgcggtacatgcgttccagcatggcggcgtacatggccgctccggccagatcctcgtcttccgtggagcatgccccgaaccacctgttgccctggaggcggaggttcacgcggtgtacgccgtgcgcatcttccacacggccctgaatatacaaatgattgccaaagatttgcgtaaccgctccgtctttctggagcttctcgccgcgcagacggatttcttccggaaaggcattgagaaagttcagggtagccctatccgggttaagtgccatgctcataatatcagactgtcatataaaaattggaaacaagcgttccttgtaaagggacgctacaggtctatgcactttactatggcacaaaaggcggattagagcaactattctctgaaaataattccaacggatgtttgaaataatggttatcttattgaaggcaatagcattatattctcggaacggcggctgttttttgaagaaaaagaacgtattttattatgttggaaagaacggatgtcagccttgcgtaacatgtgttcttgacacgttcgctataaaagggtcttttatgcctgaaattttatgtccactgcatcacttctacagttactggcgactcaagcccgcttgagcgatggcgaattggccgaacgtcttgacatgactgaagaagccgttcgagcccagcgggagcagtgggaaaaggaaggcgtgattctgggctaccaggcggtggtaaatgaggaatacgaacacgacagcagggtagcggccttcattgaagtaaaaatgacgcccgaacgcgatggcggctttgaccgcctggcgatgcgcatctcccgttttgacgaagtctcctcctgctatctggcgagcggcggctttgacctgctggtgctggtggaaggaaaaagcatgcgtgacattgcccggtttgtggcggaaaaactgtctacgctggaaggggtgctgtccacttccacgcacttccatctgaaaacctacaagaaaaacggctgtgtgttcgaggcccccgcgcagaatgaacgcctggctgttgctccgtaagtccctgccgacacgaaagaaatcatcatgaactggcagaacaaaattgcggagcaggtaagctccatcccccgttccggcatccgggaattctttgacctagtcacgggacggacggacatcatctccctgggcgtaggggaaccggacttcgttaccccctggaacatccgggaagcggccatttactccctggaaaaggggcacacctcctatacctccaactatggactggaatccctgcgccgttccatcgtcaaatacgtggacggcttcttccatgtgaaatacgatcccctgcatgaagtgctggtgaccgtgggcgtgagcgaagccattgatctggcgctccgtgccattctgaacccgggggacgaagttctttaccatgaaccctgctatgtctcctatgctcccagcgtgaacatggcctatggcgtggctactgccgtgcccacaagcaagcaggaccttttcgcccttaacccggcggtgctggaagccgccattacaccgcggaccaaggtgctgatgctcaatttccccacaaatccgaccggggccgtggcccctgtggaaacccttcaggaaattgcccgcatctgcatcaagcacgatctcatcgtgctgacggatgaaatctacagcgagctgcgctacgacggcaagccgcacgtttcgatagcctcgctgcctgggatgagggaacgcaccctgctgctgcacggcttttccaaggcgtttgccatgacgggcttccgcctgggctatgcctgcggaccggagccgctcatctccgccatgatgaaaattcatcagtactccatgctctgcgctcctatcacctcccaggaagcggccattgaagcattgcaaaacggaacctccgccatgatgaaaatgagggaaagctaccgccagcggcgcgatttcctggtgaagcgcttcaacgaaataggcttggactgccatttgcccggcggcgcattctatgtcttcccggacgtctccaaatttggactcaccagcaaggaattcgctacgcgcctgctgatggaagagcaggtggccgccgtgcccggtaccgcttttggtgcaagcggggaaggcttcctgcgctgctgctatgcgactgcctttgaccagatcaaggaagcctgcaaccgcatggagcgtttcgtgaaaactctttcctgacccctccgcgtccatgaactccgtcccggaggccctgaaaacaagggcgtacgtagcgccgtttgcggtgttcatgggctttaccctgctgtggcagcttggcgggtcgttcctggaatggaaccaccccgccgccgcctggtggagaagggcgccggagcaatggctgtaccctgtgcaggccatcgtctgctttgtcctggtcctgtggtggagaaaagccattgactgggactggaaatggaaacccgccgcatggggaatcctcttcggcgtgctgggcatcctgtgctggctggcccctacgatggcggcggaccgtctgccgggcggtccggatgcatggtttggccacccctcctggccatggtaccggtacctgctgggaattgacatgcgcccggaaggctttgatcccggcgtcgtctttgccccggattcctggagctggctggcggcgctggtcctgcgcttcttccgtgccgtggtggtggtggcgctggtggaggaactcttctggcgcggttatctgatgcgcctgatggtgaacctggaccatccctggaaaatccccttcggcacgcatagctggaaagcgtactgggtgaccactctctgtttcatggccgtgcaccagcctgtggactactgcggcgccttcatttacggttccctagtgtacctgcttgccgtctggcagaaaaacctgtgctctgtcatcgtcatgcatgcggtggcgaatgcgctgctgggatgggccgcgttggaatggggcaaatacggactgtggtgaatccggcgtttacagaaaggaacttcttgggtacatagggccgatgactccggaagaagcgatagaaattttgtgggaataccatcatgtgaagcaggagctgcgcccggcggacctcatcttcatccttggcagcaatgacgtgcgggtggcggaatatgcggcggaactctatgctcggaagctggctcccctcttgctcttttccggcgggatggggcgttttacaggggaatgggccgtgccggaagcggaactctttgctgaggcggccatgaaaaagggagtgccggaagaccgtatcctcattgaaaataaatctaccaacaccggggaaaacgtccgcttttcccgtacaatcctgaaaaaggccggcatcccggaccctgccagcctcattgccctgcaaaaaccgtacatggagcggcgtacgctggctacgctccaggcccagtggccggaagcgcaggtggcggtcagctcccctcccgtcactttccgggaatacttgaccccggaactgccgcgggagctggttgtctccgccatggtgggggacttccagcggatactggaataccccaggcgcggtttttccacggaacaacctgtgactccggaggcgatggaagccttccgcacgctggtggaagctggatatgactcccagctgctcaaggatgtgcctctcccctggaattcttgagaagacacgctttttgctttcactggccgctgattgcggtcatcaatacaacccgcatagccaacccaattatagatattatcatggcagacagaaccaatacagatcccgcccgaatggagaaaatcgtgagcctctgcaaaaggcggggtttcatcttccaggcagctgaaatatatggcggtctgaatggttgctgggactacggtcccatgggggtggaactcaagcgcaacctcaaggaatactggtggcgcaaaaacgtgcaggagcgcgacgatgtggtcggcatggacggttccatcctgacgcataactccgtactggtggcatccggccatgtgggcggattctccgacccgatgtgcgactgtctgctgaccaaggaacgcctgcgcgccgaccaggtgccggcccagagcggcatgggatttttctacaccggagccgttaaaaaggacggctcctggagcatggaaaaggaatactccgtgctggtggactctgaaaaacaggcggacaaggcccgcaagaccgcggcccagtactatgcccagctagcaggcaaggacgtctcccacaaggaaatggaactgaaaggcgagcgaatggaggccataacggactccaccatgtacaaccccgccaatggttccctgctgacggaagcccgtgaattcaacctcatgttcaagacgaccatcggagccacctccgatgaaaacgatcccaatgccactggctggctgcgcccggaaacggcccagtccatcttctgccaatacaagaacatcctggacagctcccgcgtgaagctccccttcgggatcgcccagatcggcaaatccttccgcaacgaaatcaacccgcgcaacttcaccttccgttcccgcgaattcgaacaaatggaaatcgaatacttctgccggccggaagacggtctgcgcctggtggatgaatggctggaacaccgcctctgcttctatgacgaagtgggcgtgccgcgcgaacacatccatatcctggacgtgccggatggtgaacgcgccttctattccaagaaaacctacgacctggaatatgaattcccgttcggcattcaggaactggaaggcattgcctaccgcacggactatgacttgagctgccaccagaaaggctccggccgtccgctggaatactttgacgaagaaactcgggaaaaattcattccccatgtggtggaaccctccgccgggtgtgaccgcaccattctggccatcatctgtgaagcctttgatgaagaagagctggtggatgacaagggcaagaaagacgtccgtaccgtgctccgctttgtgccccggatggctcccatcaaggccgccattttcccgctgctcaagaaaaacgaggaacaggtgcgcatcgcccgggaaattgaaaaaacgctccagccatggatgcccgtcttctatgatgaaacgggagccgttggccgccgctaccgccgccaggatgaagtgggcacccccttctgcatcacggtggactttgaaacccttggagaaaacgatgcctccctcaaggacacggtaactattcgccaccgcgactccatggaacaggaacgcgtcgccatcaaggacctgctgcactggctcattgcccgtgtgcgttaacggcgcctttgacagccgccgatgccggaaaacacttcaaggccactccattaatatggagcggccttttgtttttggaatggcagagaaaaaaagttgctggacgataggccgctggccatctagcattaaaaacaggttggtgaaccagatgggaatcagcaattccaaaatgaattgctgaactgataaactgtttgcgccaacctcaagctcacagaaattcccggggagatcggcgatttctgtaagtccttgaaatcagtagattgacattctctccaataaaatataagggggtaaggaatatgcatcctgaaagaggttggcgcaaaaagcgatttgtaccactaactttgaacgcatatccccttccgccgtcgcaccctcacgggtgcgtggattgaaacttaataaattactattaatactatcaatacgttggtcgcaccctcacgggtgcgtggattgaaacatccgcatccccgggacacaccagcaccacgccggtcgcaccctcacgggtgcgtggattgaaactccgagccttccgattgtgcccaactgctacccggtcgcaccctcacgggtgcgtggattgaaacaccttggcttggatcattccaaaaagagttaccggtcgcaccctcacgggtgcgtggattgaaacaagtgcatcctcaccaagaacggcattatcggccgtcgcaccctcacgggtgcgtggattgaaacacgactacgacgtgatgggcgatgcctacttccgtcgcaccctcacgggtgcgtggattgaaaccgggccatgaagctggcccatgaaaaagctctggtcgcaccctcacgggtgcgtggattgaaactggaaccgtggcaactggaatcaatggaacagcggtcgcaccctcacgggtgcgtggattgaaactgttgcgccttcattgaaaagctcaagtgagggatgacaggatagttgatataagttgatttagggttgaaatccgttggaatcttagaaaacacgggagttggagcgctcctggccagacaggagatatcttataaaagtcgaagccaaaatgcggagaaatgacaggtatctgatataagtgcactggctatgcagaggggctgcacaaggggtgaaagcatgagaaaaaagcacatgcaatcgcattgcagaaaaggtgaaagctgattgaaatagcgaccatgtctgaatcaaatacacctcttgttataacgccgatcccagtgtacggatcagtcactgtcatctcgccgcaggaccaagacaaagaacacccccagacctatcatctgcgagagtcggccatcgtgctgatctgggccactcgtcaagggcataaggtaacagcgtgggtgcgtgacgtactcgacaacgtgtggatcatcgtccatgaagacgattgacccaaaaaacaaaaaggccgccaggttgtccctggcggcctgaatggtatctgggctagtcatcgcataaagcgcggacaaatggagtcatctccttgcccggatgatcctctatcagcttacccgtccgctcatcgacgatacccagaatagtagaatagaggccgtcagcatacagggattgcttggtggcaacaacaagtatctggatggctagattggactgttggccattgcgatcaataacgtagcaattaagcttatcgcctggagttaaggttttcatgatgttttttctgtttcaatccacgcccctgtgagggcgaaaagttagttgttatccgacggaacactgggctgctccatgtcgatgaggatgggattaaactcatcgacgactacacggccggagtatcctctcactacattactcgcgggggggcaagactgaaccaacctaatgcctcggcgaggtctccggcaccactccagtgtcgcgtcggcaggtatatccgtctccagcatggtgcgctgatatggcagcaggcgcaggatcgtgtccagtatcctcatggttgctcctcctgtgggacgatacgccatccagatcggacctcgttactgccgatgtcaataacccagtcctgccaaatatgatcgactagcacccccttggatgggctgaatactgccataatgcggtatccatccaattgagataagcaggcagactcaatcatggctccctccttggcagctctaagagcctccggccaggtgagcggatagtcaggatcactcatgactgcacctcctggtctggcatccatatattactgcggaatccccgcgcggtgggcttatgcggcccaggagtggtgacaatgcgtacagcccccacatgatcagccagcttgccgggcggcatcgtgcgcggatcagcatgcggctcgtaggtatcctggccagtctcggaggctagtttgcgggcatcctcccgaccccggttgatgatagtatacatcaggtgctggacatgctccacggcagcgtaatgccgcaatgcctggtacacatcccgacccgtgcaaggcaggtgcaactggtcccgcacgatctcggccagatagtctgggctggtctcgtagcgcatcatagcctcgcgcaggttgtggagggccgtgtccatctccgaccaagtccggtccttgatggaggacgtgcccaggtaggtagccagtctattatagataggcacgtagtgctcctgggttgccttggtaagtgactcggtgactcctgtggcagcccaaacctcgtcatgccgccaatccaccagggacggcagggggcacccctgggactggatgcacttgtaggccttgccggccatgatggacagtacggtgatctgtcgcttggtaagtggtttgctcatatatcgatgttgggcttgaagggtgtagggttaatcagagcattgatcagttgcttgtgctgcgtcggcgttagatagattaatgttgcggtactggccccacggattgctcctgtggtaatggacaggatgatgtggtgccccatgtccttgacctcaatctcagtcatgcgcttatcctccctgctgtgtcagtcttaggctctacccaatatgcctccgtctgctcaatgcgtagtcccagggcggccagccgctcgtcatccagctcggccttgagcttgtccttgtccggcttgggatcggacaccttgaggtaggcggtgagtcccatctccttaatcttgttgcaaacggctccccaagtgaatttgcgggagagtagcaccagtgtgggattgcccagtctccaaccccatcgggccttgccggtctctccggacttggcgtccccttgcaggagcgcctcccggttgcggatggcatactgctcggcctgggccagcttggcggtgatcaggttgttgaggccatcaactactccgccgtgctcctcgcgggcggccagaatggccttgtccagtcgggcctgagccttgtctcgcttgacggtcagctcggcgatctggtccaggcattgctcgtactcggccagggtggccagtccggtgttgcgtgttgttaatttagtcattgttatgtgtgttgcttgttgatttgtttacttttgcgggccaccatggatacgacgtcctgccaggtgagaccgggcgtctgtagccatgcgtagaatttagctccatccaccgggacgtagcgctctcccagctgctccagacggatggcaatcatgcccggccagcgtgggtcgtagatagtccagtagttgccggagctggcaaatctggacagctgcatgctgatcagcgtgcacagggtctctggatcgtaggtcatggctggtcaatgtacatgtagatgggagggatgggattaaccggctcggcaccgtctatcagcttgtggatcaggtcgtcggatgcagcatatcctccgtgatgggatatatagatatctcccctgagcctatcagccaggacggctcgacactccgggcaaaccgcataagtctgtccatggcgctggatgatctccaggcgtgcgtgccggtggtaatagcagtagatgggattagtcatgacggctggacctcctctccatatcggtaaaacgggggagaaaacacctctccagcttgcccgtgtcatgattaagatgcgcattgatgcccgtgacatcgtgcatgagattgaagttatcagcctgctccatgtcagcaagccgcagagggcagccgttgcagtgacacgcctccaggtccatctggatatccagctcatcgacgtctgtattgccgtacttgtggtatagggcgcaggcccgcttggcgatgcgctcaatgatctcacgctccgcaggtgtggcggtaaacaggtctttcattgctcgccctcccggttatggtgaatagtatcaattatcacctcaccaatggtgtcgggattactggcgatgaactcattgatcagcgtggcgacacgggcggcaggggtctcatggtcggccttttggatggtctcgctatagatggcgagtccggaccgtccgctgtccgtgatgacgtcctcgatgtggaggacaaagttgcctcccttagggtccagcgtgaagttgggggcttgccgccgcccgtcctgttgttgattggtgttggtgctgtacatgatagtaatggtgttattggttggtggttgaggtgggttgatcggcctcggatggaccgacggtgatgctggccaggcgcatcttgcccagtagggtgtgcaaatgagatatggccagattgagcgagtcgtagtcagtcttggacaggagggccgccttgcagtggctgacccgctcaatgtggatatgctgggtgatgtagagcagttgccggtgctgctcccactgctcctcgcttaataccgggatgagctccagggacaggctgtgatgcgtggtgatgagggcgtcgaggtcggctaggcggaggaccacatatcgggtgccgtccaggtcaacgatggtgtacttgatggtcttcttgcgcatggtatcggagtgttaatgggtgtcctgtgcaagcatggcgtcgcacagcagggtcaggtcctgcaggagatcgggcagctgatcagcagcatcggtgaggacctggtggatatcgcccaggtcgaccggatcggtcgtaccaatggctccccatgttgtcagcgccgtgccgacgaggtcaaccagctgcggtatgccttcggcaatcctgatagcggccagggtttctggcggcaccgtaatggtgagcgtgtttttctcggtgttgggttgttgtttcatgtttgcttattgtttgtggttatacgtgttccggcatcttgccggcttccatttcttcaagttttctaaccgcggccaggtagtagtcccaggtgaggtccacccctgcattgttggctgcctccagacccttgcgcaggcgcttggtagtcttgccaaatccgtacaggttggcctgctgcttgagggtggccagcatggcccggctgggagtcggatagccgtagtaggtccagagcgtctccaggtcacgggtctcaatgtaatccgggaggcggtagatattggccgctccgcgcttggaggtctgctccaggatgccctgccacttgtcattatgctccacgtactcagccaatacaggtgtgcccaccaggagcatgccgcactgggtctcatcgtatatctcccgcagctgctcaatgcccttgcgtccggtcttgtcgctgtccagcgcgtggtggatctcgtcgacaatgagcaggtgctccggagtcaggcggttgacaatcttggcaatctggaactcggtgttgcctttgaccgacaggcctaattgagcggcaatgcggtagagcagccgtcccggactggtgactaccgggcagcgcaccaggatgaccgtgccggggtggcggcgggcatactccttgagcgcccaggtcttgccccactgcgtcttgcccaccagcatggaggcgtattgattaacgtgggtcagctcggcaatctgcatcacgtagcgcgccagagccgtctcaataaacgggccgtccgaggttgactgctggcgtagggaaaggacgccgcacaggtcgtccagcttggccagatgggggccggcaggcgcttggtaggtaccgttgagcagacggtgcatgaccgtcgtgctcaccggcagcttgtcggccagagtacgcagggtccactgatgctcgacggcgtagttgatcaggtccgtaagcatcttcttgtggccttgcttgtagggcgtggccgggatgcgtgccagatatctgctcaggtcggcgtcgttgttgattttggtgatgtcgtccatattgttattattgtgtttattatgttataaaaatcttacatcgggcaggtcgtggggcagctcgtcgtcatcgttgccgctggcggggatgaggctgatgtccggcatggactcggccgccgccgtggctgccctagtcacggcccgcttatcggcaggcgtgggggtgagggagtatgcctgggcatactcggctgccgtgaccggcttgccctccatcaaccgcctgttgtgctcgcgcttgcggacaatatccgcctcgtccttggctccgatgatgcgggcatactccagctgatgctcccggcgcccggccgccttgcccatggcctgctccacggcgtgcgtatccgccgtgcagaccctctgcacgaggcctgcagtgccgatgatgcggccgtcctgaccgcacacaaatagctggttggcatcgtagggattgacgtagccctggtacttgccgtgggccagctcccggatggctccgtcaggagtaaccacgcgggcctcgtagatcagctcctcgtcctggatagccttgtcgcgcatccggatgtaggcgctggccaccttgatggggcgggccaggtccatgcccagtatctgacagatgcaccaggcgggcagcttgataagcctgttgcccggcttggcctcctcgtaatcccatgcctcggtggggctcatccggcggcggtgcaccaggtcggctccggtctcgcaggcggtgcggatgatctgggcggccatggacggctccacctcgcaggacggagtccagggcgcggagggtgacaggcgcagctcctcaaccatgtaaccgcagcgctcccagccctccagcttgtgggtggtgcgggcattgatgtcgctgacaatcttagtgagctcgtgactcaactcgtccatggtcagcatgtagtgcttgagttgaccggctctatccgcgggcagcttgtccatcgccttgatgagctggtcctcggcacgcgccaggccgtgcagggtttccggcggcgtgcggtcgtggccggtggccccaggcagatggctgatgcggttgtgctgcaggttgtggtaactctccaggggggccttgtggcgcgggttgcccaccccacggccgccatggccctgcttgagcgtctggcgcacgcctccgatgccggagcggtccaccttgatcagaccgccgctggcatggtagagcagctcctccatctccttgtcaatggcggccgtcccattctcgaccacgagggtggttcctcgtggggagtatccgattgtagctccccacagggccaggatgctgcgcatgtcccgcttgttaagatggatcatcttgcccgtctcctcgtcgcggcggcggattttttggccccacgctacacgcttgcccgtaaggtactccagcaccccaagctgcaggggctgccccttgtcgcggccggataagacctggaggtccaaccacacgtcgtcaaacaagaaatgactgcccagccagagtccctcgcgggtggccagtacctgggccagttggggcgctgccgtgcggatgccctgcttgagcgccaccgtctccagggtctggggggcaagccgctgcaggttgcgcaggctccagccggaggggatgcgcggccagcccggccagtcctcatagccggggatggtgtcgcgcctctccgtccaggtcttgataagctgcagcctggcggtgggtatgcccccattgcgctggcactgggtgcagagaccgtgccaataggccaagaatttgctgagggtaacacggctacgggcctgtatcttgcggtagcggcggtccaccagggagaggggattgtctccgctgttgcgccagatatcataccagcggcgcatggtgacggaggatatgccacagagggctgcagcatcccggatagctccctgctgcgctccatagcaggcgctggcctccttgatgcgcttgcaggccgcatagatggccagcactctgtcccgctccaccagcggtaaatcgtccatggtgatattgtccattgtgttataatgtagttgtgccgttgaccaacccatccatcgtggccttgactcgctgctcgtcgacgttggatatcttgcgggcgtaggcggccaaggactcagcgaaaagctcgcgctcctggagacgcaataagtggatgtagccttggtccacaaaggtccccagctgcttgagcaggcaggccgcatcctgctcggcctggtgccggcgacgctccagctcatccggggggagattgagggcggccaggtcattggccagcttgtccataggggtgagggccagcgctccgtcagggttgccggctccagtaaatcccaggggcttaacccggtcatgcgttgtccgcttgcgggtagagataactcccaggttgatctccatctgtcgaggtgtctcggctccgtcggttactttatccactagggtgggcagttcggagacaggttcaccgctcagtccggcgtccaggagatacctctccgtattggccaatcgaccggctgctgtcttgtagcagcgcatgtagcggttggacatctgctgggtaaattgaaaccgtggtttcaatttatcgtctttggcgaagaattcaccccactctccatggggagtcgcggccttaagctcggtcagcagcttgcccagcttgagtcctgccgtcacggcattgcggccggcgcatgccgccatctcggcctgcgcctgggcataccgatgcaggcggttggcttcgctgacgcccagcgtcacccgcgtttcagcggttatcattagctcgtgtttcattggtcaaaatgttgttgacgattgatctcttgctgtaggatgtagcggttgagggccaccctcagcttgaccagggccttgtcttgcagctcccagatagccttgtcggacaggcccaggtaatgagccaggttcgagcaggtaagcggtccgtcgtgatgtacctggtaatggcggcgcacctccgggatgttccacagggctccccagatggcccactcatcagcagtcatgggggcgtccatatcaacgggggtgtcgtccatcatcgtgtggcctttctataactggcaggctggccgtgcgcgggtccttgatgccgtcgcgcacttgccgctcctccgtatccagataccagcctcctgccttgaccatcccaaaaaatgccagggccatgactgctatggcggcaatgagattggcggcgttcctcagcattgttacctgctcctccttaatgatgtcagttttttacgcggcaacctcctgatgcgagctttcagggcattgcctcggtctggggcccctttgagtactctgcgtacgtgactaggtgatacccctaatgcttcggcagcctcaacaggcgtataccccctgctcaagagccactggagtgagatgtcttcttgtgttctcataagagatttgttaggttcttcctatggccgcccttatggggcggccttatgaagaaactaataccagtaacgtaatatttggcaagcacaaaatatgaagaaacttctatttcaagataatttgagagagctgatgaagcaaaaagggttctctcaggtcatgcttgccgaatctactggtatatcacaaagtgctatatctctttatcttagaggtaaggcgactcctaaagcgggggagttgcaaagaatggcggatgctttgtcagtatcgatggactatctatggcgacgtactggagccgaaagtctacaagaatcttcatactatgaacataaatggagagagtcagaacgagagctcgcaaaattgcgtgaggccttaaaattattagttaacaatgtaagtaaataatgaccaattagatatgaaaccatggcagttttacactctcaccgtaataggcatctgcttgatcgctcttactggggcaatctcatacagcttgtacaacctttctacccaaatagctgatgtgacaaggctacctcaaacaggtagccaagaaaaaatcagcaagcgtccaatcaaatacgaataccgattccgcgcattatacaaaaaggatttttacgacggaaaagaagaacctttgatctcccccaatagccaaaaagaccttgatttttttggatgggattatgctggcactttgtttgacgacggccgctggatttttgtccttatgaagcgcaatatctgatgtatgacacagcgcaacattctgatcataaattttatacatctaacaagcataacaaattcataataaatttgttgtgacgttagagagaggtgcttgcgtgagctatgctcgcgtccgatgaccaacacacataccatgttgcatggggactgcatgtccctgatgatgacgatgccggaggcatcctatgatgccgtgatcaccgatcctccctacgccagcggcggcctctctaccgctgccagagcacaagacccacgcgtcaagtaccagcaatccggcacccgtaaatactacccgacgtttagcaatgacacccgcgaccagcgtacccacctgatgtggtccgtgcggtggatggagcaggccctccgcctgacgcgccccggcggctggctgatggtatttagcgattggcgtcaactcccgctcacctccgacgccttgcagattgccggctggacgtggaggggcatcatcccctgggacaagacggaaagctgccgcccccagatgggactgtaccgcaaccaggccgagtacgtcctgaccgccacgcatggaggatataacaagtccgtcaagctatgccctccgggagtggtccgcgagccaatccgccccaaggataagctccacttgacgggcaagccggtccccctgatggagcacctcatgaccatcttgcctgccaagtcccgcatcttggacccgtttgccggcagcggaaccaccctggtggctgcgcgcaacaagggacatacggccgtgggcattgagctgtcaccggactaccaccgcatcgcctccgaccgactcggcctcgtgctcactgcctaatctccgtcgatacccagtacggcaagaccgccaggaaaattcccggcggtctttttattaatgttaatgacataagtacaaattttgtattttcatacttctgtatattctattcctatatgcacaaaatattacttaattcaacgtcaaataacgaaattgaatccattactattgacggaaataatgccttgaaatggaattttatgcatgcattgctcaacaatatttttgaaacggatagacacaatgaagtagaagccctagaagacataaaattgtgggcgaacctatcagatgatgaagtgaaccaaatcctaccattctctccatgtgagagaaaaggtgacacgatgcatttgaaaagccctgctgccgaaactgcgcctgatgaattgttaatccgtatttatgaggcaataaaagaaaaagctccccacgttttaggttaacaacatccaaccattgcacgccccctgcagcatccctgcagggggctttttttggccgtcattagagatggcaaaaaattgtggtaaggttgaggcatggacgacaagacgctcaagcactgggcctccgggcccctctgtaccattacccaggcagcggccctgctgggagtgtcctcacagacggtcaggcgcatggtgatgcacggcagcctgatcgcttggcgtcccaacccggccggaagaaagtggctgctctaccgtcgccaggtggaggctatggccgtcactctccagagacgggccatccgtcacgcccgcctgctgcagagcacattcgactttttttgacgccaaatgcgccaaatgcaacaaacgcgccaaatgcaacagagggtcgccgggaatgggctaaagtgcccccatgagctacactccctctcctgttgataatactactggtgcacatgatacaatcccggctccgggtggagccgggaacaccaccaccaacaagacgccattttacctgtccaaatacttttggaccaacttggccgccttactggctctgatcatccccgacgtacgggcctggctggacagcaaccccattgaattctttagcgcccttggcgcggtcaacatcctgctgcagtttataagcggcgggaaataccagcttgccggagaggatggccagagtggccagtccgccaatccggccggcgtcctccctctccccgtcgcttccatgggggaggacgtcgctccccctgtggaggaccggagccagtatcctgatcaggatacgtcgtccatgcccaatggctccgggtcctcctcacctttgtccgggacgacccgcctgatgatcgtcctgggcgcgttgatgatcctgcttggcaactcctgcagcaaggatgccgacccggtagccaccagcgtggctcttaccgacgggcaggtggtggtcatccgtggtggctcatccctggtggtggaccgtgactcccacagcgttgcctggtcccaatcaactccggacgttgtcgtagtaccgccagtcgtccaggccacgtccaagtaacctccactctcaactcttaaccctccactctccacagcaatgacctacgcagagttacaatccaacacactggcgtggcagcgcgccctcaaatttgccggattttaccggggccagcttgacggcatcaccggtccgctgacccgtgaggcggcggcccagtggcgcgagagccatcaacagctccagacccgctacggccggctggacaagcgcacggaggacaacctgcttaccctccagcctctggccgcgctcaaggtgcgccagatgatgacggccctgcgcggtcttgccgactggcggctcatctgcggactccgcacctacgacgagcaagacaagctctacgccaagcgccccaaggtgaccaacgccaggggagggcagtccatgcacaattttggcattgcggccgacgtctgcctgtttagggacggccgtgatatctgggcacccagcgagggaccggactccatctataagcccgtggcggccctggcccataagctgggtctggtgtggggtggagactggcgctcgccctacgatcccggccatgtccagctgggctccctccccacggccaccctccaccgcgcttacaccaccggggccagcacgctggcccaactgctctgatcatgatccttgcactaatagcagacgccgctgcaggcatctcgccggaggcagtgggcaccatcctcggcgttgctctcggctcgtccgggacatggtggatggtcaagggccgcaaggctccccagcaatccgacgatccccagcgcttcttgatggaggacaagtacgccacccgtgaggaggtggcggaactcaaggccctccaagccaagaccaccgacgacatgcacaagaggctcaacggcatcaccgtcaagcttaatgagatgtccggcaccctcaccctgatgatcgacatcctcaagacccgtaaatccttatgaccactcgcgccaacatcaagatcaccgtcctgcaggtcctcgaccggctgcccgctgcctatacccagcgcgtgtctgccctccgggccgaggtatccctggacatgtctccgagtccaggtactgccgatatcgacctagctatccaggagctggaggccctgcgcctgatcacgtccaccacctgcatgatcactggcgagcgcaagtacgccatcaccgacgccggccgcgtccagcttacccagatatgaggtaacagtgaacaggtaatagttaacagtattaacgctatgctccgcaagcccagaccagacagtgtgatcggctcccagttgccccccatcatcaaggacgacgtagacaccatgctgctctccggcgagtcctaccgcaaggtgcagcagcgcctggaggaggacggcatcaagctgagccaggaggccatccggcgctactaccactcccaaatcctgccggcgcgtctggcccggcagaacaagacggccgaggagctcaacaagatatccgtggagggggtggacgaggccaccatgcgggccatccgctccgccgccctggacctggccgcctccccgtcctgcgaccctaaggcccttaacatcctggtgggactcatcctcaaggccgagcagctggcccaagacaagcgccgcctcaagatactggaggccaaggctgcccaggccgacgccgccaaacaggtcacccagtccaccctcactccagaggagcgcgaccgcaagctgcgcaatatctttggatgctaacgcatccggttaataggtaacagttaatagttaacaccaaatcaactctcatctctccactctcaaccctccatcatgtcctcctccctgatcacaacgccactggatctgctgctgccttaccaggcgcagtgggtggcggacgagagccggtttaaggccggcatctggtcccgtcagtccggtaaggattttagcacggccgccgaggcggtgagggatgcgatgatcaggcccaagaccacctggatgatcgcagccccctccgagcgccaggcgatggagtcgctgtccaagtgcaaggagtgggcggaggcatttagcgtcgcactggctgccgaggagattgagcgccaggacggccccaacaccctgctcaagtccggctccatcacgtttgacaacggcagccgcatcctggctgtccccggccggccggataccgtgcgaggctttagcgccaacctggtgctgacggaattcgcatttttcgaggaccccgatgcgacgtggcgtgcagtgctcccatccatcaccaatcccctccggggcggtgagaaaaaggtccgcctcattactacccccaacggcaagacgggtcgtggcgccaggacgtacaagatcatcaacgacaacctgcttaaccccagggagggccgcaagcagcactggtcctgccatgtggtgaccatcgccaaggcagtggaggatggcctcccgatcgacatcgacgagctccgcgaatccttggacgaccccattggttgggctcaagagtacatgtgcgaattcctggacagcagcaacgtgctgctgccctacgacctgatcgccacggctgagtcggcaagtgccacggtgtcctgcgacccggccatctacctgggcaacaagctggacctgcgcctgggcatcgactttggacgcaccaacgacccgacggtctgctggacattggagcgggtgggggacgtgctcgtcacccgcgaggtactggtgctgcgcaacatgtccgtgcccgaccagatggaggtactgcgccaccgcatcaaggcggccagacgcgtctgctacgactacacgggtgtgggcatcggcatgggcgatgtcctggtcaaggagtttaagcgctggcatccggagggccatgagtatggcaggatcgagctctgcacgtttacgcctgcgtttaagcgcctcatcttcccgcgcctccgccaggcctttgaggctccgacccgcgtccgcatccccatcgacgtggaggtgcgcgaggacctgcacgccatgcagcagatatttagaggtacggactacagctacgaggccccgcacaccagggagggacactccgaccggtgcacggccctggctctggccctgcgcgccgccgacggccacgtgcagcaccatctcccggccccaggcaccggccgcatcatcacgggagcgggcctgtttggcggccgctcccacggctcgctctttggcggccgtcccatcctacatcaactcctggcagcatagtatgatcagacgactctacaactacatcctccaccgcaggccccatgcagagggcgtgcagcgggcgcttaccgcgccggacaaggcatcccaggacagcaagccggccatgtttgccgcactcgccctggccgagctggacaaggtacgccgccgccagattgagcgcgtgtgcccgctggactacctgagcgtggataccatacggcgctgcctgcaggactgccagctgggcgcctatgccgagcagcagtggatctgggaacagatggagcgctacgacgccatgctgatgacctgtattaccaagcgggacgacgctctgagcaagtacgactggtctatcacggtcaagccggacctggacgaccgcgacagcctgctggccgagagccagcagcgcaccattaccgacctgtgcaacgccatcgttaacatggacgaggccatcacctccctgtcccaggcgtcccgccggcactacaaattcttgcagccctacgccgacagcgatggcctgcatctgttgcccattgacaactggctgatgtgccgggacggctaccggggtccctgggggtacaatcccaacgcccagtttggccgctaccggggagaggccttgccggtcccgctggacgacctcatcctgcgcctgcatccccggcccatcgacatgcccgcccagatgctggtgcttaaccgtagcacgacgctggcccaatgggacgtgttcttggagaggctgggtacgccgccggcattttttgtgcttcctcctgactgctccgaggagctgcgtcaggagtacatcaagatgtcggccatgtgctactcggcggccaccggcgtcatcgaccacgactccgatatcaagtccatcccgatatcccagacgagcgtcgacttgtttgaccgccgttacaaggtggccaccgaggagatcgccatgctgaccacggccggcaagctcacggtcatgaccgagtcgggctccggtaccttggccgggggagcacaggccgacggatttgccgactgggccggcggcgaggcatcctccatcgcctctgtactgacagtccagctggtcaaccgggtgctggatgagtaccaccccggccagccgcacctggtgaattttacgctctcctgcgtggacaagaccacgccggacaaggagattgccaacgccgccgccctgcgtgccgccggctacgacatcgacgacgccgaggtcagcgagcgcaccggctggcaggtgaccgccggggtctcctcctcccagctctacgccatcaaggccgccggctacgtgccccagcagcaggccatggagggtgtcgtcaagatgcccctgcagcccgccccccaggagacgccctacacgcttaactcccgccgccgagacgccctcactaccctggctctgcaccgcagcaccacactctgggagccagcccgcctccgtctggaggaggtggtcgcccaccgcctgcaagacatcgacaaacgcctggagcgggtcacgctggagatgctgcccctctccccggcggagcaggcccagctggccctgatgctgcaggtccccggagaggaggagatcgtctccaccgcactccagattgcccgacgcctccaggaggcccgcaacgaggggagacgccgcgcggcggccattgacccgtctctcacattatccacccctgcacgacccctgcacggcgcaaattcagcccaatccaacgcatgagcaactaccgagacagatacatcgcccgcggcatcccggattttgacccggctgcctgcgctccgtaccccgtcggccaggtcccgcaatcaggctggtacctgattgagccggccggcacctacaccatcccggtgcccgacacctccatcgccccaggcaagcgctgggacgtggacgaggtcatcgacgaggcagcactgcaggccatctgcgagtcctacgatcctgccatcaacggcggcaacggcatccaggtcaacaacgaccacctgcatctgcgcaccaccggcgataacccggccctgggctggtgcaaggcgctggactacggccgggtcgacggcagcctctaccaggctgcctacatcgcctgggtcaaggacacccaccatgacctcaaccaaggcaagtactgggcatttagcaccgagtacaagctggccgactataagcgcgtctacgacaacggctacagcccgacgcgcctgtccggtctggccgtcaccaacaacccggaccacgaggcccagccgggcatcatccgccaatccgctgcaggcgatgtggtcgtccacagccgcagtgccaccatctcccaaaccacaaccatgagcaagaaagcaacacagcaacgggtcctgcactccgacgatgccgccggagatgaggaaaagaagaagcaagaaaccaacaccaacaatgacaatccttcgcccgctaccacggaggaggaaaagaaaaaggaagacgaaaccaataccaacaacgacgaccaaaacaaagacgaaaccaactgcaactcggacgacgagggctggctggggatctgtaacgagatcgccaaggcactcaacctgtccgagaccgcgaccggggacgacatcctcaaggccgtgacggatctcaagacggattttgatttgctcaagcagcaggtcgatgagtccaacggaggctccgttgcccacaacagggcacccctgccgcgacagctgcataacaagggcaaccagcagcgcatggaccccaaggtcactcctgcgggtgtgatcacccaccgcacgccggagggcaaggccgtcaaggtgccgcagagcgacgtcgatctggtggcccattgccgcaaggccgtggacgccgaggtcaccaagcacggccgcgctctgactccgggcgagtacaaccgcacctggaccagggctgcggaggaattcacgtcctcacgcagcaaatagctccactcccaactctcaacactcaactctaaacaagatgattattaagcaaactcccgtggtgcgccgcgactggccggccggcaccaccggcaccgacaagagcgagggcaaattcgccaagctctccgctgacggacagacgatgtccctggtgacgtccgccaccaccgtccctgacggcgtcgtcagcaaccccgacggacgcgacggcgccgacggcaacggcggcgacctgatcctgatgcctcatccgggcatcgtccaggtccgtctcaacgacactcccggcatgatcgagaccggcacctatctggtgctgtgcgctgatgccaccgtcaaggcagccaccggcacggccggtgagctcatcgtggctcagtccatggcccccaacaccagcggacagggcagctgcctccacgaggccctgctcgtcgcctgggcaacgcccaccgcctaatacgctattaactgttaactaatcactattaactcatatgagcacatctgcaacttacgccgtcaacctgccgctgaccaactacatcgtcggctggtacggcactcaactccacgacccggcacgctttcttgctccgggtgtcaaggcccccggcttgctgacctcctacaagcgctacctgcgccaggacgcatttgcggtctccgatacccggcgcggcatgtacgaggcacctcgcaccatcgacatccagggagaggacctcccggtcatgttggaggagcacaccctcaagatcggcatcgacgaccgcgagctgctcggtgccatcgaccaggaggtctaccgtaacagcctgcgccaggccaagacccggggactggcccgccgcatgttgattagccacaacaaggaggtgtttgattacgccaactccatcatccccagcatcaccaaggtgggcgacaccaacgaggccaacaagtggaccaacctggacctgcccttggcggatatcctgaaaaagatggctaaacaatttgctcggaacaatggagtctatcccaaccgcatcctgactacgggcgatatctgggaccttgttgaggccaacaagcaaatccagtacaagatgggtgaggggtctcccaaggtactcacccaggacaagttcctggattttatcggtctaaaaggagacgacatcccgccggtcaagatcatgcgctccatcgcctcctacaatcccggaggcgtggcgggagcagaggtggacaacgtcagcatcgtgggcagcaatttctacttgttttacgctgacgacgatccgagcccatttgacatcacggcgctcaagacgctcaacatcgccggagacgacatgtacagcacggtggagacctaccgtgacgacgacatctccacagagtggctgcgcatcaagggccaccacaaggtggtcttctcggctccctcctgcatgatgcgcatgcagatcgcttaatacagggtggagtgtggagagttaagagttgagatgctcttgcctccacgctccctctcttaatacttaccatcaatacacaatcaagatgaccgctaaatcaaccaagaccaacaaggctaccaatcacgacgctcctcaggctcccgctcaggatatagcacctgccaataccgaccaggagcagatcacgccgcccgcagaggacaccgctgccgaggcatccacaccggagcctgtagccaatcccgccaatcaacctgccgtagactcccccacgcccgccgacaagggtgacggcaccaaccaggaggcagggaacgatcacggacccaacatgaccgaggacgagtacgaggccctatatggccccgccaagaccctggagccatacgtcgcctccttgcgtcccatccaggccggcttgactcccagacaggagatcacagccatcatcgccggcggtatcatcggcggcttgctggcccgtaccaagccctacgagaccctcgacctgcataaggcggccgagaccctgggcatgtgtgacacgatagtcgatatgatcctgcacctcgacgatcccgccccggagtccccggacgagcaacccaactcttaactctccaccctctactctcaacaacaatgtcaagctggatcacattgacggcggacatgctcacggaggccatcgaccgagcggagctggaggccatcacggccgccgacacggatggcaccgtcatccccggcatcatccaggacgtgacggcagccgtgcgcgaggccattgctgccaacgccgccaatgtgatggacctgcagagcgacaccaccatcccgcgcacgctcaagccggaggccctggacatgatcgcctggcgtctgctcaagcggtttgcggtgatggtctccgaggaccgggataaggccaacacagccgcccgcgagcggctggaggccgtccgggccggcacccaccgggtgatcggtccggatggccgcatgcccgtgcctcccggtaagcgcccctacgtccagggaccgcgccctgcctacggctccggagctccggggttgttcccgtcccccggacggggagttaacaggtaacagcagctcaactctccactctcaaccctcctcactcaacagcaatgccctctccctcggatatcatgcgtgccaaggtcacggtgcctgctgccggcatgtcgtcggcggactgggacggcgtggacccggatatccgcgagcgctcctactggacggccaggcaggggcactatgcgcgtgtgcagggatttagggatcgctcccagggcattgtggacggcaacctgtccgaggccgacgccctgcgcgaggtccgcgcgatgctcaaggccaccggctaccagccggagcccggcacagagggcaccatccaggacctcaactccgacgcccgccagcgcctgatcctggagaccaacgtggccatggtccaagagcgagcctaccgggactccatgatggggtcgctggcctatccggcccagcgtctggtgcgtatccgctacagccgccagcccagggactgggccgcccgctggagggaggcggcggcggccgtcaactacgagggcgtggccaccgacggctcccacatcgcgctgcttacctcgcccatctggcgcaagctcagccgatttgacctggactatcctccgtttgattttaactccggcatgggggttgacccggttgactacgaggaggctcagcgccacggcctggttatcccggaggcgacggtggatgacatggacggcgagtcactcaacgccagcctggaggcgtccatcgccaagatggacggcgacctgcagcaggcatttgtcgaggctctggaggattgcgtggaggtggagggagaccgcgtctactacaccgaccccaacggcacacgcccggtgcactggagcgaggccgggcgtgtgatctgcgggcagcgccctcccgtcatcccggacacccaggccagggccatggtcaaattcgtggaggaccagcgcaaatttgacaggagccagcgcggagtccaggactacgccacccaggaggagtgggacgccctctacgatgccgtcaaccgcatcacgcccaccgacgtccgggagagcggcacgctctaccggggcatgtccatcgaccccaacaacgccgaccaattcctggttgccatcaagcgcgacggctaccaggcgctccccaccaagatggtggacagctggtcacgcacggaggagacggcgcagcggtttgccggcagcggcaaaccgggcaacgagaggatcatccttgtcaacgaggactaccgctccggccaccgcatcgacaccatcgtccgcactctccaagatcagaggcgtcttgtcaacaagtccgaccagcatccccataccaacgagagcgaggtcctgttcatgcagcaggtccgccacggagtcaacaagatcgtccgggggagggacggtacgcccacctacgtctatgtcagcgagcagtaataacagatcaacccttacgccggagatggcggttctggcggccgttgttatggcggccgcttacaaacggtctggccggctgccagccctgggcgcgggctcggctttcccagtcggacggctccggtcggatgccggacgcagcatcgcgcggtctggccagctccttgagccaccagcgcaggtcgcggttactgatcttgccgtccatcccactcatgtcccccttatgcctcaacccttaactgatgtcaactcatgatcaggttgcacgtagatgtgattgggcttaaccggctccccctggctcccgccatccgcacggagatggtggctgacgtggccagggctgcccgccaggcagtaagggatagtttccaggacatgctcgaccgcacccagtcccagagattctggggcgcggccaagcgatcagtcaaccctcccgtcatccgggacaacaaggccaccatcgacatcacccacatcggcgtgcgcctgcagtggctgggcggcaccgtcaagccctccggccgcaagtcggaggtgaccggtcgccgcatcaagagcctgctcatcccgtttaaggattcccccctgcgccggcgctccctggcatccctcaatatcccggaggaggaggtcatggtcctgggcgacgtcgataccggcagcgccatcctggcccgcgtcaagcagcgtaagcgccgcaacaaggacggccactaccaggatgtcacaccactgggtgccctggtcaagtccgccaccatcccggcccatccggaggtgatgccctcccgcgagcagatgcgcaagaatgccgtgtacgccgccaccctggtcctcaaccgcctcctggcccaggccgacgacaactcaacactcaactcttaactctccactctcatggacaaggattacaagctcgccgagcatctcatcaagcacctgcagcaggacgacgtcctggctccgatggtgtgcccaaccgtgtgggacgaccaggaccaggtggacgccatcaaccgcgtggccattggcaagcccggcagcgtcgccgtcactcctgcaggatacgtccccctgctggacatgggcgttgatgctccgatggtgcgcatgcacgccgtgctggccgtgagctgctttgccaggacagccgggatgcccggaggcatgccgcctctgcgctgtctgtccggcatggtcgggcaggcgctgcacgcggtccgcacctgggacccggtcgtcgaccgcgtctgctacgacatgccttccgtggcatccgtcgaggattacgatatgagtaagtccaagctcaccggcttccggggacgggccatcatcctctacgctcccgtcaacttttaatttttccctcatcctcacccacaacacacaaccatggctaagaccaacacaaccaacaacacagatacgaccggcacgactccgcaggctcccgcccaggaggatacgctggtgttagtccgcgtgaccaagacgggcacgctcatcaacggcgcttacgggcgcgcaggtgcgaccgccaaagtgacagcctcccaggccaaggccctggaggcggccaagctggccgtcatcatcggcgtgtaactaccaaccattaaccaaccactaatcactgatatgtctagatttatcatccccggcctgatcatcggctccaaggtcagcatcgccaaattcggagcctccatcggcagcggcgaccaggccaagaccgtgtctgcagactggctgcccgtccctccgagcgacgaggaccccggcccctggctctacatgggcaaggtccgcaccagcaaccctcagattgagcccaagaccgcagagattgagggcaccagcgtcggcggcacctacgagaccgaggagatgcagctggtcaccaagcgtaaattcctgtttgcctccaactacatcacccctgaattcctgcagctctcttttgggctgcgcgaggactggggcacggagcaggttgtgtttgccgccggctccacgcagatcgacgtctacgtctacacggagtggaccgacgcctaccgcgacggcgccaggatcatgagcgcctgcatgcagggccgcctgcgtctggtcaacccggccaaggcggcgtctgatccgtccctggccgaatttgagctcagcgttgtttacaacccgctttgcaagctgacgcctgacgcggactatccggcggcctaagcacgccacttcctcccggcgatccgccgggaggaacctttctcaactctccactctcctccccccacactgatatgatactcctgattgacttggccaccatggccgtcatgcaccccggcggcataccggtcaccgacctgtccctggtgcgcggcgataagctgcccctgcgcatcactctgctggatgagggcactccggtgactccctccggcacaaggccggcgctggccgtcaagaccgccctgggtgacgataccctggtcctggccgccaccaacctggagccggtcgacgacgctctggggctggcttatgttggcagcttgtcggtcaacacgactcagttgatcgcagccatgggcagcgccgatcgcatcgacctggtcgcggaggtggtcattattgacggagacggctcccagcgcacctcatccctgatcaaggtaagagtgcgccaggatatcatgccggcagacgtcgtccctccagatgacgtcatcgtcaactgggaggagatggtggccgcatccctggccaaccagctgccagacgccttgcacaacgccggcatgtatgtcactccggccagcggcacggcatccatgtcgcctcccggctatgaccaggaccagaccgtggcatggtcatgggctcggtttatatttggcgatgacctcttgaccggttatgtcggatcgatctgcaaggtgcgtgacgtgtacatgtgggcagtcctcggcacgacggacaccacaccgcgctggctggacatctggcgacgtgctccgggcggggactgggtattggcggcacgatccagtcaggccgtagcatccagcactgacgtggacctgtacatgtgggggatgattgccgatacggatattgtaatcggggacgaggtggcgctgcacgtctatggtggcacgcccgaggcgccagtggagatccccctgtccatcgcccggcagatggtgacggcagccgacgggcgcgggattgcgtctgcgctggacggaccgattaccgatgccaccgtcatgcccgcaatgatgttgtcctgtacttatcaggacggcgtcagcgtgggaggggttaatctggccacccgcgccgaggtgcagcggttgacggattatgctgccgctaccagcaagcagacataccaggatgcccgcgcatccgaggcggccagggacgcagctcaggagattgccgagggtctggccatcactgttggcacggtcacgacgggcgagccaggcagccaggcaaccgcctccctgacacccggcagcacgccgggatcgtggcaactggacatgactataccgcgcggggacgtgggcgctgtggacacctccaaatcctacacatggacacagccacaggtatttgatgccaccgtcacggcatccaggggcgttcgcgtgccgctgcctgccacggcccaggaggctatctcttacgaggcgctgatagagcagcgggccgcagatgattggcggcgggcgaactactacatggagacgctgatcccgtcttgggtgacaacactggtgcggcagatgcagatgtccgacgcttataatgtagtcacggccaacgcatcctctaaggaggcggtgtataccaacgatctgcacgattttttgattaccatgatgccctccgccggtgtgtctttgattggccgatctacaggcgcgtggaaatttgccaattacatgggagatcataacaatagtgcttatgccgccgccgttgtatggcggattatcggctctgacaaggcgtctatcctgctggggagcacatcccaagggtactcatcgacaactaatccggcagcgccctgttatgctcaccccatccattgggctgactacaatctggacgcagcggattacaggtatccgttgctcaacgcagtcaataattacaccagccgggacatggcacccgcatggcaggtgacgatttatcccacaagctacctggggagtacgacgtcttgcctgatccgaggcacggattatgggcgcgccgttggcgaccagctatatatgtgggcgcttgtgcccaagatcacttacgttgccgtggcaatggcaccccgcgcagccgccgatcatcaaaacacgatgaacagatgggaactgtttgtcgacggcaattatgttatgccgatgacatccttgttttgtggcagcggccacacggcctgcgtcacagttaaggccaaggctcacgaggcaagcagtaccttgcaagtggggctgcgtatgggaggcatgaggattgacgcagcccccgcgctgggggtcaacgatgtacgatccattatggggcgcgtggtgatggacggagtaacggccaagcctatgccggcggtgacggcttccgcgctggatgtacctgcggagggcggtgaggtaacgctgacggtatcgtccacgctgtccgaggcggtttatatactcaacgataccatgtgcgggcatgaccccgccgccgtatggtgcatgcagtcctctgagcagacaccagccggaggcggccagatcaccctgacgctggctcccaacacgactggccagccccggcaggtgtgggcgtttgtcggccatcactacgcccaagcctccgtcgtcaagattaaccaattagcttaacaacaacatgcaagagatacatttacattttccgcgcccaggtaagtgggacaagtacaccatgacagccgtgtaccaggacgcggacggctacactcacactgaccattatacccaggatgacatacccgccgatcaggccccggtcctggaggcaacagtcaccgcaatcgcgagcatgggtgaggactggcaagcctcccaggtgtgggcacaactgggagacgactccgtgatcaataaccccgctgcccgcgagggggccgtcgaggtgcacgaggccgtactactgacggttgaggctgtcaatagtgccggcggccggcgcatttgcacaccctccgagtacatgcagtttgtactcgcggaccccagcgcggtggcgtttttccggtatttcacggctctcaactcttaagtctcacctctccactctcatcacaccatgcactacctctctctcgacacggtcatctaccgtccggacggactccgggatatcgtgctgtgccaatacgacgacgtgatggaggagctggtgaccgtcaagccatccgtccagatccagcgcgaggccgtcatcggtagtccctggatgcaccaggcagcccgtggcaacgcctccctgcagatgtcttttaccctcgtgcgggcgtttacgactttcgcccgcgcccatgcctggggactcgacctgcaggaggcgctcaccctgcacccggagggtgtggttacctggttgtcctgctactaccagggccggccgggccggaccaggacctaccacgctacggttgaccttgcccagcctctgccgctcacgagcgatcatgacctcggtccggatgggccgcgcctcggccgccgtccggaggatatccggctgccggatgccgagggcaaggtctgggctgccctgcaggtatccctcaccctcacgggagacatctcttaaccactctattaacttttaactattaactaataactatcatatcaccatggcagacaaggattacaaggtacaggtaggtgtggaggccaaggccgacacgcgaggactggatcaagtcaacaagggactcgacaaggtccgcaagacggcacaccaggtcaacgaggagctgggcgacaaggaggtcgccaccaacctggaggaggtgaccgatgccgctgaggagactgccgatgccctggacaagaccagtgacgctgcagagggtgtgcaggaggccgtcagtcaggttggccaggaggccaagaccaccggcaatgagatggacaaggccggcagcaagggagaagaggccgggcgcaaaatggagaggggagctaggagagcggcgtccggattgggtaacctcaagagcaaggtacaggcgacgtttaacatccctaccgagctggaggctgcctacaaccggggggtggcgtggggcaaagccatcctggatgcctgggataaatacattgagggcgtggacaaggccgctgtcaagcgggcgcgggagcttaaggaccggctggccaccgaggccgccacccgcgagcaggcttataccgatgcgctgaccaacgccaagcgagagcgcatctatgacgaggagcagcgcaggatcacggccatcaatgacctctacacccagcgcctccagctcatcggccagctggccgtcaaccgcacggcggaggtggatcatgtcgaggccctccgtcaaaaggagctggagctgcagcgtaccatcgtcaagacccgcgagatcaggggggaaatcagtaaagaaacggccgccgccctgatggccgacctggacgcctccgaggccaagtccgctgccaagtctcgtgaggatcgtcagcagatcatgctggatgcagccatccaggcacgcgatgaaacggccaaacaggtggcccagatcaaggctgagcaggagcaggcggccaagtcgccttatgcgggtgtgactccggatggatatcgcacactcaagcgacgggaggaggtgcttgacaaggcgcatcaggaggccaaggacctcctgccgcagaaacagaaattagaacaggaaaaacaacgcctcgaaaaaagtattagcctactcgaaaagacgcaggaacttaacaagcagcaacggatgaatccgttgctgggggcggaaaatgccatctatgagacggagcgcagattacaggcagaccgtgcccgattggagcgcatcaataaagagttgggcacagccaacattgctattgccaaagacaaatcccagcaagcagagcgtcagcttgttgaagataaaatagatgccattgaggactattaccgcactagcaatcctctcaagtcgtactcggctaacaacgatggtgcagagaagatgaagaatgatatcgccgcagatattgcagctcaggaagccaaacaaaaagatatcaaggaccgtctcaaggaaaaagaaaaccagctcaagctggacgaggccaacgtcactactcagcagcagatactgcagtaccagcgtgagatcaactccaaggaggctaccatcgccgccgccaaggcggatcaggccagcgccgtggctgccgacgagcgtcggcaaaaggacctcgccgaactggccagccagcgcaagggcgtccaggagcgctggcgcgagcactacgacaagctcactgccagccaggattacaaggagcgtgagactcccaggctcaagcggctgctgacccaggggcagcacatggccgatgccggctacatgtccgagcaggacgccgtgcgcctgggacagatgcgcgacgaggccctcaaggggttgcccagggagctgcgggccaaggtcaagtggatggtggacgacatgatcaagggatactccagagccgcgtccggagagagagagttgttgactcccctggagcgcaaggacctggaggcgagtcgctacaaggccaagctggacggcctctccgacattacgcccagcctgcccaaggatggggccgccagcaagattgtggcgatcctcaaggatgtggccaagtacggcatcctcaatgaggccaccgtcaagcggctccagtccctgtccatgcgtatcaacggagacgatgccgccgggcagcgtgtcgtctccctggtcaaggagctggtccagggcgagctgggccggatattgatgaccatgtccaggcctcagccggtcaagccccgccgcgttactccggagggccgcgacctggacgcggaggatgcggtgcgcacgcgtatccgggccggagcccaggcgccacaacctcctccgcatcctgctccccagcctgcagcaggccaggactacagctccatgatcggcgagtttacccggcagatgtttggtcagagcgacacctctggccgtatcctggatgtcatgcagcagtttgtcaccatcgccaagcaggcggccgataactcctcccggcacaacgaccgtttgagcacgattgagcgggaggtggcagccctcaaatcccgtgagcagtacggtcgccattaacccctatccatcaccgattgatcctccatgcacgtcattgagctaacaggcagcgccatcaaaggagccaagtatgactggcgcaattttacggccgccaaggtatcttggctgcagctggcccgcgaccaggacgagccggctccctatgcctacctggatgatgtgcgcgtagtctgggacggcgtcatcgtgctacagggcacgatccgcaagtgcgctctggagcagtccggcaatgcctggcgctggtccatggaggcatgcgatatcctccaacccctggaggcggccttgtgtttcaatcctggcggtaaactgagcggcggcttgtctccctatgtctccggaggcgggggtgatggcgtggacgtgccgcgcaagatcaagatcgccagcacggtgcagtggctgctggaggatgcccgcaagtacggactgctaccggcagacgtcggcattgaggtggccgtatctcccacggcctggatgtgggacactgcgttgggctgtgacatgtatgccggggtgttgcgcaagcttctgggcggccgtcctggcatggtgtgctgggttgattactccggggcctctcccgtgatcaaggtggctgacggagaggagttgccggtggcgacgctggaccgtgtgcgcgatcggttgtccggtatcaacctgtctccccgcccggacctggtgcctccggccgtgggcgtcgtactgacggccggacggcaggcttaccagtcccaagtctggcccaagggagctgacctgcaccaggagggatgtgtcaccatccaggtggcgctgtccggtggcgccacctccaccggggacgagcctccggtcagcagtgaggaccccgtctgggattttaccaagccgattgtcgaggtcaggggcgacaggctgcccacgggtacgggggcggccgacctcaagtggtggcagtcccaggtgccggagctggccaaggcgactggagtaggattggggatcatcaagcggtctctgatagcggatgtagagggcagcgacctgtccaattactccaccgatgatacggcccagcgatatcgccacgcgtccggtcaactgtccaccatctgcaagaccattaagtggagttacatagagctgcgccaggtcgtatacaccgacaccaagcctcccaagggcaccgagatgatcttcaccaagacccgcaactttggaggccgcgtccgctattggggatggctcaagtggcgcgggcgcaccatcaacaagcagcgcatgcgttaccgggccagcaagtccggggatgccgggggggatgacggcagcgatccgcccatcagcggcggaggcacaccgccgtcatccacgatggagtggccggattatacgtccatcctgcggcagtattacgagatcacccgtccgctgccctgggagggtgcggttacgtccctgcgcgccctctgtccggccgggttggtgggccgccggctcgccctggagggcgctcgccgtgcgtaccgggacatggctaccgtcgtccagggagtctcagtggatttagccggcgagactacatcactcacgacgggcgtaccctctcacctgtccctgcaggacatggtagaccgcatccagcagatggctgccgaccagcaggagctggaccaggagcagcagcaggacaacccggtccagacattgcaatatgacgacgaggcctacaagtcaccggatgccccgaccatcggcccggagggcggcatggtatggagcgaggcgccggagcagcctcccgcctacggctatcaggtcaccctggagcgcgccgagggcagcgacgacataaccggctgccgaattcgtccgggcaagctgatgctctccggccggtacatcggtacggttcccacgcccaatagcggggagtggtttgcgtcctcgtgcacggcaggcgagatatggctggacgtcaaattcagtggtatgggcaagctgaccggcacctccatagcttacgagcagggggcggtcaaccccctccgccttcagatggaggagggcgacccctcggaggtgttttcctattccttccacttggccaccatccgggacaaggaggtcatccagcacatgctgggcaccatccaggtgccggtctacggaggcactttctatccatacggccccgccatctaaattttaccctatatataatagtatgatcaggatttttattttttcgtactccggagacgccgacgaggcagcagcttgcgtgcggtgcgcccggatggccgtaccctatgcgagcgtgacggtggtagatgatgcagccagtccggtacaggaggatatcgcagatgctctccggtccatgggggcggactacgtacaatccacctgggagcgcaacggcaacctgcgtggcccggattgtatccgcggcatgctttccgagatgtgccgggaggccgaggatgacgatatcctggtcaagattgactgtgacacggctctcctggatgacggctggctgcggtggatggagtcccggccatggtgcccgatgtatgcctctggggattttatcgacggctcctggaggatttacggctgtctgtacgccttgcgcggctggatggccagacgtctctaccgggagatggactggacgctcctggacgattcagcgccggaggacgtgacgatcggccgcgaggtactggccagagtgccggtgacattgtgccgggttgaggagccgtggcgacaacgatctccttggagcgagtggacggcctggtgctggcctagcaggacggtgagagccgagagctatgcggccaggtttgcgatggtgaccaccggttcccctcgcatggatgaccggccatccagcgagcgggccagagtgatgcacctgctggccgacgccagggagcggatgctccgggagggagtggacagggaggacgatgaggcggtggattggggtgagcttctggccgcgtgtaagggtgaggcagagtctatgcagacaccctgcgcggagtaggcagacaggcaagttatatcagatacctgtcatagttctatcagatgccttggcgcgttacacaaggcgacttgtcgcaccctcacgggtgcgtggattgaaacccgtcctggtgctggcccagctcaaccgcgacgtgtcgcaccctcacgggtgcgtggattgaaacattggtatcctccggcatgttcttgacgtagattgtcgcaccctcacgggtgcgtggattgaaacctgtctgcaacgggtcttccgggttaagacggatgtcgcaccctcacgggtgcgtggattgaaacagagtccaaaagatactgttttgcgcggctggaagtcgcaccctcacgggtgcgtggattgaaaccttagtagttcctcagccttggattgcattgctagtcgcaccctcacgggtgcgtggattgaaactaatagttgaatgttagtgtgttgttattctccggtcgcaccctcacgggtgcgtggattgaaaccatctgggcggcggattgttcgtgcatgacggcagtcgcaccctcacgggtgcgtggattgaaacctcaacttcacgcgctatgtggtaatcctccatagtcgcaccctcacgggtgcgtggattgaaaccaataatttttcaaatctgtagcatatatccttcgtcgcaccctcacgggtgcgtggattgaaactgacggcaagaagctgaatagcctttgccgtctcgtcgcaccctcacgggtgcgtggattgaaactctaactccttttcaaggttagcacaaagcaagagtcgcaccctcacgggtgcgtggattgaaacaacccttcttgcctgcggcttgcagggcttccagtcgcaccctcacgggtgcgtggattgaaaccgttggacagtgacgcatggttattttccgggaagtcgcaccctcacgggtgcgtggattgaaactaaagacgtagtacattttttcgcccagggccaggtcgcaccctcacgggtgcgtggattgaaacgcttcgtggaagcctgctgaaatacggaaaacatgtcgcaccctcacgggtgcgtggattgaaactatattttttcgtaagaatctctaacttgttcacgtcgcaccctcacgggtgcgtggattgaaacctgtgtcagggtccgtgatggtcctggtttcgagtcgcaccctcacgggtgcgtggattgaaactcctccagaaatcccacaaagtccttctggctcgtcgcacccacacgggtgcgtggatttagatgtcgcagactgaacggcctactatctctggaatgagaaggagcagttggctataacactcattaaaaacacccttcatttttagtgaagggtgttttgacatttgtgaaaagaaacagatcagaagccttcaatcatttccggggttaaccccggtagatcatatttctttacaatatttccatcctcggagacttcaatggaatggtgaaccttggcagaagagtattgaccgcttttacagttatgttcccaccaaatgactttttgaatagacatgctaccttccggtcgtgcagaggaggcatctccttcaaacatctgaggaagcgcttgtttgaaaatggatgcatcttcatccgagaagcctgtgagttctgccagctgcggattgattgctccaaagaagacataggtgcccttgtccacccggtgcttcatgcccatggtgtcggaagattttttactgccgtctccgtcattgctgacgcttttcgtgatttgtgtactagtgatattcaccgtatctctgctgaaggcaggttgaatagtgactgggcctctgattcctatggagacgccggtgccttttgccgcatctttgtcttttaaggcaaagacctgtccaaaagctctcacatcataccattcctgacaggctttttgtgccagttcagcagacgtacctttttgtttcaggatgggagtagcacgttctttcaatgttttatagtcgtctacacgtctgtcgtctgactggacaaagatgttttgtcccatgtccatcagcttattgcggatttttcttttaagacagacatcggagatttctccgagtccttccaaagtggttctgggccggttgccatcgagggggtctccgttggggttagcgtttgtaacggtaaagatgacggcaaagtcgattttatgattaaggctcatgatgtggttttatagtgttgaattaatgttttattctaagatttattttgccagttcagcatttttttcttctttagttttgtaaatgaaggctctctggcagtggtaaccgaggaggtaggcgccggttaatggtccgttatccatgaactgtcccatgaggaatgtttccatgatattgtctatgtaagcatcatagcttttcaagaaagaaacggtgttttcatttttcttcaaaatgttgcgatagggctgaatgcttttttccagcatgggccatgtttctgacggtctttgctggaaccgctgcataagtttttccgcattggtggggcgggaggttttcgtgatatttaatgctgatgtttcgatggcttctgcaacggctaaaagacggccgaagaggtaactgcgatctgtgatttttggatcaaggctcatggtatctgaggacgaagtatttgtttgtggatgattataaagataaacggaacaggatactcccaaggtcatttcccattcccaccattccatggcatgtcgtttggatgtctggagaacacattgtttttccaggtccggaggaatgggaagattgtgaagaatacagggtagtagtctggagagggcgtgtttgcgtagtttatcgtctacctttattccatacgctgctttgacaatcatggagatagacggcgcgccaatataagatcggtcatttccttctttgtctttaggaaggcattgtttccatctggctttggaatgccacgaaagcaggttgttaaggtattcggagacggtgaattcctgaaagctcgagagggacatgcgccccggcgacgcagaattcaagctgagaacaagaacacggtttttaatatcgttttcattcaatgatgtccgcagcagctcttttcctcctccggagagttcttttttaaattgcttaaccaattgggtgacttggtcattcggtgttggctggtcgggcgtgtagtgttcccattcctgcacattgccgcagggagacggaactttcaacagaccgggagaccaggcgagaacgacaagatctccatcataccagccttggcgggagataagccagcgaagcgcgctgtgggctttttgggtgacttccgtacttactccgcacgcttcatccgcttcaatgaatctgccgcggtaggtatagccggaactgtcattggaagaaatgagtttggctttgtcgccggcgtttctgatgcgtgccgggtgagtggttgccagaggtgctgtttttcccaggacatagcacatcccttctttgttggccttggattccgtataaatccgccaggattcgtacatggcggggtcttcatacacttccggagggcttccatccctgctgttgaccttccatcttatgaacgcattttcctgggtggatgctcccaggatttcaaagatggcgggcatttcccgtttgtcccctttccatacaggaagcagagtgttggtggaatcttccgcatataggattcccccgttgatcaagtccgtgatcagggattttttacgaatataggccagaacggcgttcagtttgacattaccgggatcaaatgccgcccattccgataattgctgttcatattgttcgtaggattcctgaagggttttgagttgctttgtccgtttggccggggattcttccggagggaaatagtcagcgttatcacctgccacgtattggagcttgtcacacagagggtgggcacaggctccgctggtgcggcctcctgaggcttccgtaacggggatgatggtgggttgactgttctgattgttgagggatgcattaattagctctccctgtttgttcagtgtgatggtgatgtgagcattctgcatgctgtggtacagcggcagaagaggggtaatgaggcgttctttcctgttgccgtgggccggttctttgtcaatacgacccacataatcacggttttgttcataggtggcgtataaggcgtgcatccagttcatctttttctttttcctttcattctcccaggctcagatcattcagtccgctggatcttggcgggcatgccgccatggggcgtacatgcttgacaatttcgcatgcttcagggcgcacgaagcggatcattccattttccatgaccggacgccaaaaacgtatggaaagctcctcttttcccgtttcatccggataattgaaaccatggaacatgagtccgaaagacgtgtttccatattggtcatagaatccctttccttctccaaaccggcatggttccacgtatccctggcattccctggttcccaacgcgatgtccctacgtcctccgcggtcaatcatgcgacgggcaatttcataatgcttgccgtcgatccggtccttggacatatccggacggtacatgttccattcaaaatgagccttgacttgatattccacatcttgaaggtaggtatatacggataaatccgccccggcttcatgatatttgatcagtttcatatttttgggaaccagacggatagggcgcattattctcacctcgtcaattaaccagatcagggtgggtttccagtagaccgcctttacaattcctttcagggcttcataagtggggatttgataagaacatttttctccgcctatccgggtgagggggtcggagaaaagcgcatatttcccgtagaccttaaattcgatttgattaagcatgaatatgaagctgttgaaatttttaaatccgggaaacggtcagcgcaccggaagtctctccggggtctgtgagaaagcccagaaatggatcatatttattaggtactgttgtataaatatccactccttcctgtatacgcatgatgtctcccgcattcaagtattttccaagaagtcggttggaaatcgcgacggaataggctctggctttttggatccattcattccattgttcccattcttcatccgtatgaggattcatgttccagagtttttccctgcattcttcccctcttccataaggggtgataacagctattgtatcaacctggatcggatgatagtggcgtgctgccgagtcaaaggcctggaaaagacgaaggggagcatatttggactgctgacggggatatgtcatcagtttgggattttgagatagcgcatcctccatgttggtgacgacgccggagcatttaaacgggtaagacagatgatcatgattatgagagcgggtgagcttgccgtagaattccttaaaatagagcgaaacggatttgtttcccagaattcctccttcttcaggatcacaaatcattcccatagcaatttctcttccgatttcaagttcccggagagaatccagtctttccagattgcctgcgggattaatcaggataactcttcccccgggacggttggcgtccctgttgcatcggcctgccgcttgagtgcaggaatccaggccggccacgctccgtatgattacgtcaaaatctacgtccactccggcttcaatgaggccggtactgatgcacacaacggcttttcccttccttctggccttttccagggattctttgtcaatacggttcgtgatgatttctttcctgtgggcagggcacatgttggtgctgaggtggaaaacgtccgcctctgtattcaggtcccggcaggcgcaggccagtttagaggccagttttttggtgtttacgatgacgagggtggggcctttggagaaagcttgctccatgatggagtccctcattttttctacggtccagtaattggaggattttagttcacagacaacctcgcattgacggaattggctaaattgatcgaaataagcttggctgtccggaataataggtgtttcgatgagatgagcatgcgttccgtcttccgtggcagtttccggaggagtagccgtacagcggatggtgctgctgtggcagatgccggagagaaaatccagcgaatgttcaaaaagccgtagtgaggttgggggaatagcttgcacttcgtcaaaaataacaacggcatttgccagggagtgcatgcgccgcacatgctgtttgccggatgcatataaggcattcaagtattggacggatgtagtgagtacaatgggaacgttccatgtttgagtggcttccatgtaccaggtttttcttttcggtgaccatggttccatttctccctcctcgttaagggtttccttcaccagattggaatgatgctccaggatgcagtctttatattcatttccaagtactttccggatggcattggccgtttggtcaagaatggaggtatagggaatgatgtagatgatgcgtgacaaatggtgccgccgtgcatgttccaaggcaaatctgaggcttgagagagttttgcctgcaccggtgggaagtgtaaggttccacttgccaacttgtcctggcgcagcttgaaggcactcctgcgacatggctgcccggctttgattgatgggagtatcagccttgaattgttcgagatgtttattcaagttttttaacattccttcccaatccgggtccggaatgctttcgtagcttccttttccggaagcactggtgtaatccgcttcgataaggctgctcaagcagaaccgtgcgattagtccggcatggaatgcttgtttttttggacagtggccaaacagggtggcaaggagggtgtaaacattcttgaattccgtggccagttccgtttttttcaggagagagtagtaatgatctttctcctgaaacgtcaatttggacaggatttcatcaagatgggttttctctccggatttttccatgcgcttggagaatacgtcatctccgggcatcgtgccacggaagcagtcaatgagagcagagttgtgatgggaggcaatacataaagcaatgatttgccggaagataaaaaattcttcagagtcctccgggatgggaaaataattccagacaaactgggctccagcagtggaatggtctatgccgctttttggaattggaggactgatatgttgagagagagcatccatgtattgctgaaagtctgcactcattttgccgaagtcgtgcatgccgccgatcaaggccccaaattgcgatagccctaagggagcaagcagggtagacatcgtacgggaacattcttgttcgtgagtggaaagagactgatgggggcgagcctgatacatgtgaaactatcataggttccatatgatcatttgcaatatatgaattgattaatttagtattttatttagtgtttcaccctgaacagaatttccaagatgccttcttcctttttttcagtgcccctggcggcattacagcattacttgtattgtcccaggcaatgcgcgctgattcatctggaatgcgtgtgggctgataatcaatttacggcggaggggaatgtatttcatgaacgggcggattccggcatgacggaaaaccgcgggcgaaagaggatcctgcgttctcttcatatttcttccctccaatggggaattcacggcattgcggatgtcgtggaggctgtttatgctgagaaaggcggcattcccgtatccatgacgcccgtggagtacaaggtgggcaagcccaaaccgcaccgtgcggatgaagtgcaggtgtgcgcccaggccttgtgcctggaagaaatgtttgggttggagattccctccggttttctgttttatggaaagccccagaaaaggatggaggtggtatttgatgaagagctgcgtactctgacagccggggttatcaggaatgccagggaggtgttaaccgggggagtgacgccgttgcccatgtattccaaagcctgcaagtcctgttccctggtcaatgattgtcttcctgacgtttgccgggagcacaggcagaccatgaaggcccgggtggatgatgtgtttgaagatagtcttggtgcaagtgaagctgatgatttatgaagaaacatttaaataccttgtttgtgacgctggagggatgctggctgtccaaggatggcgataccgtgaaagtcaattcggaaggaacatgtttgctgcgggttcccctccataatttggagggtattgtgacgctgggatgggacataggagtttccccttatttgatgggggcctgtgcggagcgcggcatcacgctttccttctgcaatccttacggtaaattcttggctggcgtccagggcttcatgaagggaaatatcctgctgcgccgggagcaataccgctgggctgatgatgaggcaagatgggttggcgttgcccgggaaatgataggagccaaaattgccaattgccgcagtttgcttttaagagcgcagagaacttacgggaaagatttgtcggaagcggtggaccgtctggctgctttttgccgcatggcccgcgggtgcagttccggcgatatgctgcggggcattgaaggttccgctgcggaaacatatttttcctgcgtgtcccattgccagaggacggaagagccggagttagtgtttgaaggccgcaacaggcgtcctcccaaggattgttttaacgcccttctatcttttctatatagtctgttgtgccatgatgccaggtccgctcttgaaagcgccggcattgatgcggccgccggttttctgcatcgcgaccgtccggggcgtcccggaatggccttggacctgatggaagaattccgggcgccgctggctgatcgcctggctcttacgctaatcaaccgcaagcaaatttccgcagatgatttcgacaaggaggaatccggagccgtctttttgaaggaagattcccgtaagaaagtattgaatgcctggcaggagcgcaagaagaccgttttggtgcaccccttccttcaggaaaagacgacacagggattgctgattcacatccaggcccttttgctagcacgtcatttgcgcggagacctggactgctatcctccgtttattggcaagtaaaacgctccttagccatgtatattctcattacttatgatgtagctacggatgacaaggccgggcagcggcggttgcgtcaagttgcccgcgcctgtgaaaatatcggtcagagagtgcagaattccgtgtttgaatgtgagctggctccggcccaattggttgacatcaggaacaagctgcttaagattattgataacgagagcgacagcctgagaatttatcacatggggtccaattggcatcataaaatagagcaattgggcaaggagaagagtttcgacatttccggccctttgatcatttaaaagctgtctgagcacggcctttgcgccaaccccaagctcacaccaatttcccgggagatcggcgattggcgtaatacattgggaatggaagattgacagatgaatacttagaagagaaggctaggtgatgatggccttcttcgggaggttggcgcaaagtatcgtttgcgctgttgaataacaatgtatatggtcaggcgcagtcgcactccgcaaggagtgcgtggattgaaaccagtccgtcgccacccaggtcgaaggggaagtgacgtcgcactccgcaaggagtgcgtggattgaaacaaccagccgactttgacaagcccggcggcgaagcgtcgcactccgcaaggagtgcgtggattgaaaccgcaaaagccctcgtgccgtccaccagggacgtgtcgcactccgcaaggagtgcgtggattgaaacaaacggccagggaccggaacgcaagtcccgaatcgtcgcactccgcaaggagtgcgtggattgaaacttctcccatgaaaacgaattgaacttaatttctagtcgcactccgcaaggagtgcgtggattgaaaccagaagatcaatgccattgtggaaaacaccacggtcgcactccgcaaggagtgcgtggattgaaaccttgaaaccctttaatccttagtgccatgaagaggtcgcactccgcaaggagtgcgtggattgaaactgtgcatggctattcatgaagacggggagcttacgtcgcactccgcaaggagtgcgtggattgaaacgtggcggctagggatattttctttccgttactcgtcgcactccgcaaggagtgcgtggattgaaaccagataccagcgtgctttcttgaggtcttcaatagtcgcactccgcaaggagtgcgtggattgaaacgttaaactacaagtaaaacagctgtcaagaaatgtcgcactccgcaaggagtgcgtggattgaaacaagttcaaactgttgcatcaccttggtcatcaggtcgcactccgcaaggagtgcgtggattgaaacgtcgctggtcagatgctggttgatgtaggccctagtcgcactccgcaaggagtgcgtggattgaaacgtcccggtagctgtagtaggcactggcactggccgtcgcactccgcaaggagtgcgtggattgaaactatctcgcaaatatcattatctgataaacacaaccgtcgcactccgcaaggagtgcgtggattgaaacctgaatcccatctcaaaattggtaatgacatcgtgtcgcactccgcaaggagtgcgtggattgaaacggatttacgctatccaagtaatgatgaagcacttgtcgcactccgcaaggagtgcgtggattgaaacattaaagtattcgacgatatgcctcaaagctggagtcgcactccgcaaggagtgcgtggattgaaacataccattcggcgggataaagcgttaagtgcgctgtcgcactccgcaaggagtgcgtggattgaaactttgaacatttcacacggccttaattcgcatccagtcgcactccgcaaggagtgcgtggattgaaaccccactatgggcgtggtaagggaaaacgcggtccgtcgcactccgcaaggagtgcgtggattgaaaccgtagttgtattcccacgcgtagaattgagcgggtcgcactccgcaaggagtgcgtggattgaaacttcaccgtcttgacggcaaacaccccagccagttgtcgcactccgcaaggagtgcgtggattgaaacggtatcatggtcacaggtcaggtgcaggacaacggtcgcactccgcaaggagtgcgtggattgaaactcgttgagattatccaaagctatagcagacaaatgtcgcactccgcaaggaatgcgtggattgaaacatcggaaaggcttgctatgtccggatttgcgtaactcttcctaaaaatgaaaagctctccaggcttgtttggtctggagagctttttttcgggtttcgttgtttatttttcagccgggggctgccggttcagatcgagttctgcgggagggagggactggagcagggtcagaatggggtcctgcggtgcggcgcccgcttcccgctggcgtttgaattcctcctcttcctgctggagggccgccagtttggtatcttccaccagcgccttgaatttgtccgcctgggagtattctccatccgtatcccggaagacgcgggccagccagcggcgtttttcttccgtgctgagcaggggctctttcatgggctggggagggtgtttttatccagcaggtttcctgcaagctgttccccatccgcggtggggcggtagacgtaagggcggctgtccccgaagcggttgatgtatccctgtgcaatgaggtcctgcaggatgttggtaacggtattgggatgcaagcgcgtggcttccgtaatggtactgtggcgcctgtatccggcaatgacggccaggatgacctgggcgctgctgaggcggaagtccagcctgcggacgttggaggcgaatatctgtatgaagtccagggctttcatgagcttgtattcacaagttgttgttatgttgctgccttgttattctcctgttattcacattcctccgggcaggcgggcgacttgattttcctcagcaggtccagcagggggtgggagtcgttggagaagctctgcaccgcattgacggttgccgcctgcgggagaatgattttatggaattcctggtgaagattctggcgaaggctttggttgcccgtcaggggcatggccagcttttctgccaggcgggtagccagcgcgtccatgaagaggggatcgaattgttcggcgtcttcaatgtcggctatgtagctcatgggcagcggcgcgcgggaggcgtggatgcgccttccctgcattttccattccgtgcattccacatccagcacgcgcaggcagtccgcaggcagggtgaattgatagggtgtcagggagttgggcgcctgagcggagacggagtccagcgtggtttgcgtggtggcgaaggtccagcgcgccatgcagagggtttccctccgtgccgggtggtaatgaagaacgcagagacgggatgccgtggattcattggcaatcagcgcgtccagcggagcctcccctattttggagagtgccgcgttgcagatgtccagcgcggagggagtgtccggctgaagtaaggattcattgatcataacgccacatgtttggcggaaacggatgcggaatgcatcacgtttgggaacaccctctttgatgccaccggtggcacgtatgcgcccggtttttccccggatgcattttcctccaattcatctatttgataaatgcatgcaccttcccgggcaattccgggcaggtgaggagaccgcccttttcctccgcggggagcgaacgttcccgccgcatggatcgtccgtgcggcaggcggaaggggccatcagtataaaccatgcatagaaagtaaaagagattatgggatttatgaaaccgtccactccttccactccagctccggagcaggccatcccggttaaggcggagagcgtgggagaggaagtgggagaagattatcaggcccgggagcggcagaggcaggggatgatttccaccattctggcgcgccgcaattcttccgtcgggcagggggaggtcaatccccggactctgcttaggaaaaccctgggataggcaccgccatggaagagagagttgcggagctgaattccgtgtacaagtccctggccgcccagcgcgcgccgtgggagacgtggtgggaccgcctgagggattacgtgctgccccgccgcctgaaccgggaaggggaggtttccctccccaacagggacgccatggaccgcatgacggataccactgccgtggaggcgtgccagaagctggccagcggccatatgtcctacattacgcccagccatgacgtgtggttcaagtggtcggctccggacgaccggggaggggacgaggcggaggcctggtacaatcagtgttcggagattgccctgaaggagctgtccgtttccaatttctatacggagatccatgagtgttttctggaccgcgtggctttggggaccggcagtttgtttacgggaagttcctcggacggaaggctgctgttcaccaatattccgtgcggtcagttcgcctgtgcggagaatgcggaaggccgggtggatacctacgtcagggagtttacctataccgcccaccaggcgcgttccatgttcggcatgaaggccctggggcccagggcgcgggaggtgctggaacgcggcggcaatccgtacgccacgtccctgcggttcctgcatgtggtgcgtccgcgcacccgccggagccgccgcagggagcaggccgcccacatgccgtttgaaagcgtgtatctgtccctggacgaccaggtgatcgtggaggaggggggatatatggagtttccctacctggtaacccggtttttgaagtggggcagcggtccgtacggcctcgcgcccggcaggctggtgtttcccgccatccagcaggttcagttcctgaaccgcattctggacacgctgggggaggtggccgccttcccacgcattctggagctcgccaaccagattggggaggtggacctgcgggccggcggcagaaccgtcattaccccggaggccgcctccctccaccttccgcgggagtgggccacgcagggcaggtatgacgtcgggatggaccgtctggcgcagaagcaggacgccatccggcgcgcctattacctgcccatgctggagctttggagcggccaccgcggcagcatgaccgccacggaggtgatggcccgggagaacgagcgcgtgctgatgttttccccgtccttcacgctgtttgtgagtgatctgtattccaccatgacgcgcattttctccctgctgttccgcatgggcaagtttcccaggcctccccgcgccgttctgcgggaggggagggacggctccattgccgtcggagagcccagggtggtgtaccagtcaaagattgcgctggtgctcaggcgcttgcagagcgaggggatggaccgcagccttcagcgcctgaatatgatgatgcaggccgctccggatttggcggatcatgtggactgggaccattgcttccgcctgtccacccgtgtggacggcgctccggagagcatgctgaggccctgggccgatgtccaggccatgcggaaggaacgggcggaccgccagcagggggccgcacaggctccggcggaagaggatccgtacgcttccctcaatcccttgcttgaccagttaaccacgattcaggaatgaaccaggatacgacattgcagcaggaggcctccgtccgggaggcccgtctcagaaggcgccagcttttccgggtgtttgacactccggacgggcgggaggtgctgacctttctggaagcccgcttccagactgatttgcccgtttttcaaggcagcccggggagttatgaccccctggacgccatgaggcgcgatgcctacagggaggttttcctgtacatccgccgtcaagttcagttagccattaaagaatccacagcagaagaaaagaatgattgattccattgataataatatggccgctccctccggggaggcggatttttccggggcagtttccccggaggcggaagcgttgacagaagccgcggctcaagccgtgcctcttccttcccttctgggggaggacggcggttttgttccggattggtatgcccggtttgatgagttgaaggggatggagaagtccctttccaagttcaagacgccagaagcgctggcgaagagttatgcggagctggagcgcctgcggcattatcccggtgtggagaatgaggagcagatggctcggttccgccggatggccggcctgccggaatcggaggaagattaccgcctggaacgtccggagtccacgccggaaagcgagtggaatgcagggctcgcagaacgcatggcccgcacggcctaccgttacggcgtaccgccggaagccatgaacgctctccaggaaacgatggcccaggcatatgaggaggcccgggaacagatggcggattcccggatggagatggaaacgcaggcggaacagtccctgcagcaggaatggggcgccaattatgagcgcaacatgggcagggctaccgccgcactccagcggcttgcgtccgagacgggagtggatgcggatgccctgcttgacaatccgggtttagggtccaatccggacgtcatccgcctgctgtaccaggcctcacgcctgcttgatgaagctcctcttcatcattcgggggccgcaacgccctctccggcagaagaagccatgcgcatggagtcggatccctcccatccgctttatgaggcgtatatgaatgtgaaccatcccaatcacagatacgccaatgagttatacgaccgtttgacttcccggtagccgtccgggccgtttcagcaacggaattggttgaaaagcaagcccggcgggagaattcttccgccgggcttttaatggtcattatttcatcagggaaggagggtcaagggctggggccttcatctgccttcatacctttagcgtcccgaaacagggcttgcgttcaaaaaaagttggaaaaatatttttttccgtatggatggagaagggaggaagatatgacttataccttttaccgtaagtaggtatggatagtattttcacactggttcttattcaggcagcttccatcaatttttacacaaaccgtccgttgatgctggcatttttcaacaggcgccagaccgcatcatcccattcatcagggaggggcaataaaaaatcccgtccggaaagggacgggattttaagaagatggtacgcggtataggatttgaacctacgacctccaccatgtcaaggtgttgctctaccactgagctaaccgcgcgttttggaagtgcgggcggattattacccgattaaggcggaaagagcaatactttttttgaaagcggtccattttgtgaaagggggaggaagcattcctgccgggaggaagacgctgatttttcttcctatgcggtgtatttttgctaatttgggaagaacatttcacaagtatgatgaacagacattttatttttgcgttgtgcgccgtcttgggattcagcgtttccggcgtttccatggcccagagcactcccgcggacaaggaagccgccgccaaggccgccaaggcggcgaaggtgaaattccgctggggcaagagcctgaagagcgcccagaagcaggcggaggaaaccggccttcccatcgtccttcttttcacgggaacgtcctggtgcggctactgcattaagctggagaaggaaatcctttccaagaaggagttcaaacagggcatggacggcgtggctatcggcgtcaagttcgagttcggcagttctgatttcagcaagtccaaggaagccaagacgtatagaatcaccggcgttccggccatggtcgtggtggacgcggagggcaaggaactgggccgcacgggttatattcccggccagactcctgtccagtacgttgaatttttcaagaagtacgcgcccaagactgcggaggccaagtaacgtatttgttccggatcggaacgttttcagcgggagcggcggcagaacaatcgtcgctcctgccgtgttttgggaagaaagatgggaaattttccctacactgtttttgatggctcaagttcaaaagaagctccatgaaattatgacaaacgcatattgaatgaaggatttgcccatccggtcctacctgcatgcctgaatttacaaatgcatttagcggattaaaggaaggccggatgcttacccatgatgaattggtaagggccatccggttcatgattgctgcggaatatgaatctattcagatttatacccagcttgccgcgtccattgaccacaaattggcccaggaagtcctttgggatatttccaatgaagaaaaggaacacgcgggcgaattcctccgcctccttcaagtgctggccccggacgaacagggtttctacgatgaagggatgggtgaaaccaatgaaaagatcgacaaattgaaggcgtcctgcccggacggcaaatgcagttctcaagccacccaataaagggttttccagccgccactgcaagacgcccgtttttttccacgaagaatccgggcgttttctcatgccgcgcatgtgtcccggctcgcctctttcatttcatgccgacagtggggaaagtcccgcagcgggaaaattgaggagggaaaaactgccgtttcctcatatggaaaaaagccggaatgcgaggctggattccttagaccgtttttaatggaaaaagttcaaagaatgtcgcgaaaaatatatgacaaaaacattttgaatacattagtggtgatttgagtcatacctgcatgcctgaatttacaaatgcatttagtggacaaaaagaagaccggatgcttacccatgacgaattggtaagggccatccggttcatgattgctgcggaatatgaggccatccagctttatacccagcttgcggaatccatcgataacaagcttgcgcaggaagtccttttggacatttccaatgaagaaaaggaacacgcgggcgaattcctccgcctccttcaagtgctggccccggatgaacagggcttctacgatgaagggatgggtgaaaccaatgaaaaaattgacaaattgaaggcgtcctgcccggacggcaaatgcagttcccaggccgctcattgacggaatcttctgtctgattaaaatgcccggtttccctccatgggggaccgggcattttaatgatgccgggcttttgcttccagctcggccccgtggcgggcgcagaaggcaatgcagcgttcacaggggcgggaggcgtagtaggcggcggttctttctccggggcgcgccgtctccgcagccaggcgttccggagacaatcccagcagttccctgcagtaaagcgtgccgaattcctgcttgaaggaggcggccagtgattggaccagggaaaagattttttccttttctccggtttccggagagctgtttccatacaggctccccgccagcatgctcagtccgcaaaaagcgccgcatacttcccgcatgcgtccgatgcccgctcccaggggggaggagagcttcagggccgtttcctccgtcaggccgcagacgtctgcaaaagccgcaaagacggactgggaacagttgtatccctggtggaagtaatccagcgcccggactgcccggtcttccttggaaccgttcatgggaaaaaggttttcttttactgctccttttcagcgggagcgtccgctgcggcgtcttccggttttttgcggtccgtcaggcgcagcatgaggatgtagcagacggccagcaccagcacggccagaataaggggaaggctttcgctcttgacggtggaaatcagctcctccggggacttgagcagttccggatgccgttccccgatgcggtggccgtaccaggcgagcaccgtgcaccagacaaacgcgccgagcacggtgaccagggaaaagacgccgaagcccatgcggacaatgcctgcgggaatggagatcaggtgccggatgacgggcagaaggcgggcgaagaaaacgcctgacacctcataccgctggaggaagacttccgccttctccaccttgttgggcggcatgaaaaagaatttgccccagcgcatgatgaccgggcgccccacaatacgggctacggcgtaggtaatggcggatcccagccaggagccgaacgttccggcaaccaccaccccccagaagctcatggatgctccatcctgggcggacagaatggccgcaggcgggatgactacctcactggggacggggaaaatggagctttccatggccatcaggacgatgacgcccgcatatccccagtcctgcacccaggacatccaaagtgagatcaactcatgcataacggcgcgtatcttgcattaaaatccttgaaagaaaagtcttttattgcaccttggaaaagaggctggtaaggttggaaggcatacggcgcgcgccgttgcagagagtgatgaagctttacatgatagcaggcgagaagagcggggacattcacggagccctgctgttgaagaatctgctgcgcctgatgcccggcatggaggtcaggggactgggcggccacggcatgcatgcgttatgccccggcgtggaggattgggcggatgaagccgccgtcatcggcgtggtggaggtgctcaagaaatacgggtggttccggaagcgttttctctccattctggagcagatacggcaggaccagccggactgcctcattctgatcgactacccgggattcaacctgcgtctggcggaaaaggtgcgcaagtgctgcccgcataccaaaatcatttattttatttccccgcaggtatgggcatggcaccgcggccgcattcccaagatggtgcgcatgctggacctgatgatgtgcatcttcccctttgaggctcccttgttccaggaagccgggctgaaaacggagttcgtagggcaccccctggtggacgagattgcttccatccggaaggatgacgtccgggaggcgtccctggtcggtctctttcccggcagccggaaccgtgagattgacaggcatttcccggtgttgatagaggtggtccgccgcctttccggggaacggccggagctgtcttttgaaaccgcagcttccacggaggcgcttgcagaaagaatgcgcggcatggcgcagaaggccggcatgccgccggagctgttccacattacggtggggggctatcatgaactgatggaccgcgccgccgtgggcgtggtggcttccggcaccgccacgatggaggccgccttgcaccggcttccgtacatgctggtgtacaaggttcccctgctcacgtactggatggcgcgcatgcttattaaaatacgcttcatcggcatggtgaacattctggcgcagaaatccgtagtcaaggagctgatccagtttgattttacgccggaccaggtgattgaggaaatagaacgcctgctggttccggaaaacagggatgccctgctggcggaaatgaagcaggcctccgacaagctggggcagggcggagcggcggaacacgcggcccaggccgtctgccgtctgctgaaggagtaatgctccggttttttgacgatttgaaccgggaagaattgcgccggccattttattgatggaaacgggttcgcaaccggaatggggaaaatacatccgtggccgttgtctggtgaaatgccggttccgtttttccattctgtctcccggtccggaccaggggatttgttgccgtgaattcccggtgaacgttccttttggaatcggaagtagtttttcaggcagagaaatccttctgtggaatgttcctgctcgttctgccgggcgcagcatttaaagctatttccgggccggagaggccccttgaaaggaataaaagaaaagcgccgggcgaacccggcgcttctgttgtgttttacgttggcagcaagtgtgtcacaaccgggactcaaaccactccctggtcgatcatggaatccgccaccttcacgaagccggcaatattggcgccggtgacgtagttggtgaaggatttgtcggaagagtattcctgggcgtgggccagggcgttcgcgtggatgttggccatgatgctcttcagcttgtggtccacttcctcgcgcgtccaggagaggcgctggctgttctgggacatttccagaccggacgtggccacgccgccggcgttggcggccttggccgggccgtacaggattttggcggccaggtaggtttcaatgccttccaggtccgtgggcatgttggcgccttccgccaccagggtacagccgttcttgatgagggtgcgggcgtcttctccgttgatttcgttctgcgtggcggaggggaaggcgcagtcgcacggaacgctccagggacgctggccttcaaagtactgcgccttcgggaactgcttcacgtattccgcaatgcggccgcggcgattgttcttgagttccatgacccaggccagtttttccggggaaatgccgtccggatcgtaaatgtagccgttggaatcggacatcgtgacgggctttgcgcccagttcattgagtttttccaccgtgtactgggccacgttgccggagccggacaccaggcaaaccttgccctgcaaatcgtcgttgcgggtggcgagcatgttctgggcgaagtacacgcagccgtagccggtggcttccggacggatgagggaaccgccccagttcaggctcttgccggtgagaacgccggtgaattcattgcggattctcttgtactggccgaagaggtagccgatctcgcggccgcccacgccgatgtccccggcgggaacgtccgtatccgcgccgatgtggcgctggagttccgtcatgaagctctggcagaagcgcatcacttcattatcgctcttgcccttggggtcgaagtcggagcctcccttgccgccgcccatgggcagggtggtgagggagtttttgaaaacctgttcaaagcccaggaacttcagaatgccgaggttcacgctggggtggaagcggaggccgcccttgtacggcccgatggcgctgttgaattccacacggtacccgcggttcacctgaaccttcccccggtcgtcgatccacggcacgcggaacaggatggttctttccggttccacgatccgttccagaatcgcgtgggcttcatacttggaattcgcggccagaaccggctcaatcgtgttgagcacttcctgaacggcctggatgaattctttttcgtggctgttcctggttttcaccaagtcgagcacgcgctgggaatatgtctgtgccatcttctctgttgttgtatttgggttgacgcttcatgcgcggtttttcgcacgcgcttttcgtttatcattccgcggcgcggactggcaatcatttttttccccggaaagtgtaaagggtcagcaggaaaatagaaaatatctttttatgttgtaatttgtaaactgacccctatggacgatggatattcgttcatacggcatattccggggggtggaaaccggaggacatacctggtaatccggcttctttttccccggaggcggattttgaatccggtgtcaataaggaatgaatgaaaaagaaaaagttatcaggaaacgccgctgtgccataggcggaattcgcctgtgatgaatggacgggacattttttataaacaggcggttttctgcgtcttgcgtgattgtccggattcaaaatccttaaactggcctccattgtcagaatagtcaaaaaccatgaagaaaacattattcctgcttatttccggaggggctttttccatcgcccaggcggcttccgtttttgtggacgtgtacagggatggcccaggcagagacggcatgaaccagtacacttccaatgctgcggctgttctccccttggcggacgcttccggaagcgatactccctacacgcttaaaatcgttaaaagcgccgggaatttctttaacacggagctttccgccgtaacttccggggagggtgaccctgcctattacgcctattaccagaacaaggcggcgatgacggatctggtcaataccctcggttcttttgattacggtgcgctgtcctcctacatggctcccggcgccggaggctccaccacatcctccattcaattgggggggctgacggtgggagacacggtgacattttacatgttcatttccagtatcgtggccgctccgggggccactaccgtgaccgggggaaccggcacctttgaatacgcggcaacggacgggaccggtttttcgtccacgccttccttcgccaacggcaagctgaccctggtcaaatggacaggggaggcgacggcggatactcttgatttccgtatcggagggcagaaagccggggttgcggccatggcgttttcagttgttccggaaccggcttcggcatccatgggattgcttggcctggccgctatgctggtgcgccggcgcagggcataacatcgttcgctccggcgttctttatcctgtcacggggtgatgtccggagggacggcatggttccctccctccggatttttccatgtgacgggccgggagaagcttcttttggacgctcccgcagggaaaaatcaggcggtcaggcgttcgatccatgcccgcgtcttcaagtctgtttccgccatcttcttggcccggtggagcagggtgcccatggatttgggaatgcccatgtgcaggcggttgctgatccaggcgtacggaaccagcgtgctttgccggacggccagggcaatgatgagcttggacggatggctgtagggcgtgacgagcaagtcctcctccgagagcccgaacgccttcaggccgtttttcacaatgatctccgcctggtattcccctatttccgaggcgcgcatgcccgtcgtgacgggctttctgcgcgccagccggggaagttcgcccaccagcctggcgcgaaaggcgctggagccgtagcaccagccccgctggacggtgccggggcccacatggccggcggggagcagggagcgttcgtccatgcgttccgcttcaaagcggcccatcaggtggttgaggtatttctggcggccgtcgtccgtgtcgtcgcagccaaagcagacgaggccgcgctccggatgaatccacttgggccttttggcgggcgcgtccagccatgcgggcaggctggtccatttgcagccggaaaggaacgtgtggcggcgtgccaggccggaccgcgccggattcagatggatatagtcgatgatggtggaaaaatagtgggcgttttccgcttccaccaccatggcgtggtacctgcccgcaaacaggtggccccgcatgcggtggcgcgcgttgaaacgctgggtgtaggcagtctggagccatttcatgccgtccaccaggttcgcgcgcgcggtctggaagagaatgtggtagtggttggccatcagggcataggcgtacacggtccagccgcttctgcgggccgcctcctggaaagtgcgcagaaaggtctccctgtcttcgtcatccaggtaaatggcgtctccgcggttgccctcgctctgcacgtgatagaccgctccagggtattctattctcagggtacggctcatgccggaagcataccggatgaggtcaaaaatgcaagtttgttgttatttttaacctgacccctattgcgaaaaaagagggtggaaaaaatgcgtttttaagcgggtccgtgtttccggaaagggggagcccgcctccggtgaacgccggacaggatgctgccgggaaagaccgggaagccctttgcccggatggcagcggcgcagccatgccggcgtttccccgtcttttttcatgaaaggtttgcggaggaatgaggcgccggagaaggccgcggtgttttattccctgaattccgtcgggagcgccgcatgccaatgcggcgacggaaaagaaaaagggagccagcggacgaagagaaaagagaaggcttcctttgaattaacggagagggttgcctttgtccgtgtattttttaagagcccctggggcctggtgcgcttcccgcgggtcttcccggaaccagggcgcggcccggaaaacgcctctcctattgcagcttttcccgccgcatgatttcggagagaaccaggtaaaggtccgtcttgttgaccactcccagcagcagatcgttgttcgggttcaccagcgccagggattccgagcagtgggggcgcgagaagatgcccagagcttccggaaggtgcatgtccgcgggaagcgtgggcatgtcgctgcgcagcacgtccatggccaggacggcctgggccagttccttgttgcgggcgaaggccgccacatcttccgctaccacgctgcccaggtatttgcccgccggggaggtgacgaagatgggctgcgccgggttcttgatgagcatggaggcaatcgtgccgaatttatccagcgggtggaccacgggcgggtccttgcgcgccacgtcctggagctgcacctgggccaggggcttgtcaaaggtgcttctgggtccgaaggccagggaatcatggtacatggactgggccttggtgagcctcgccatgccgtaggagaccagaacgccgatgatcagggggaacatcatgtgcccggccatggtgaattccactaccagcaccagggaggtgatgggggcgttggccgccgtggtgaagaaggcggccatgcccaccagggaataggcgatggcatggtcccccggaactccgagctgggtgagcgccgcgctgaacaggaagccgcagacgctcccgatggtcaggctgggcgtcagggcgccccccaccgtacccacgccgaagacgatggcgacggtgaagattttcaggaatagcaggatgccggccctcgtggcgtcaaattcataatgaatgagggaggtgatgatgtttttgccgttccccacgatttccgggtaaaagatggcgatgacgcccaccagcatccctgcggccatcaggcgcacgggaagccactggcgcttcccgttcaggtactggcgcgattttttgaggatcaggagccagaagctggcgaccagggaggccagcgcgcccagcagaacgcaccagagcacatgctggttgcccgtcagggacacttcctgctggagctggtagatgggggccggttcatggaacaggcccatggtgaagtatccggcgcagctcgccaccagcaggggggcgagaaagtcaatggtcagcgcgcccagcacgatttcactcacgaacaggccgccggccaggggcgtatggaaggcggaggacatgccggaggcggcggcgcaggcaaccaccaggcgcaggcgcggggcggagagatggaagaagcggcccagggcggaccccaccacggcggcggcctgcaccagcgggccttcacggccgatggaggcgccggaacctacggagaaaacggcggacagggagcgcagcaggctgggcttgggcggcacatagccgttgcccagcgccacggcttccatgtattccgtggccttggccgggacaaagcgatgggtgaagagaagggtgaggccggccagcaggccgcccgccgccggaacgaagatgcaccaggcccagtcctggctggccatttcctgaaagacctggatttgcttgtagctggtgcgtcccgtcaggacgtcctgcaccagttccacccccatttcaaaaacaagggccgtcagggcgcccagcgcgccgacgacgactgcccagatgaagatgacttgcttgtcacccagcttgaccttttcacgcaggctcagcgccatgcgcagccatgaccaggaaatgtgcgtcttcgccgcaggctggttcttcttgtccgtcattgcagggcgtgttgaagggacgccagcaggctggcttcgtctcccgtccattccccgttggggcccaggggagcgtttttatgccaccgcagcagcttctgcatggtggtcaggtagccggtcaccatggcggtgggaacgcccagcatcacgatgaggtgggcattgcgtgcgtcatccggccagaggacgccttccggactgatgcctacggtgacttgcatggagtccagcgcgctggtgcgcccgtgggggacggccaggccgtggtccagataggtggtttgcgtttcctcgcgcagaaggaccgcattcttgatgtgccttagctgacgttcgtcaaggacttccgccatggaatccgtcaaggtttccagagcctgttcctgagtggttgcgggctggaacgtgcgtacgtgaatttgaagattgtctgccaccgggtctgctaaaggcttttggcttttaattctatgaagggaaccatgattatcaaggaaattctggcctgcgtacggggaaggaggctttccctgtgaattggggcggacaaaaaggacccccgcgcctttccggcgcggcttttttgacacaaacgcggcggaacggcctgtttttaggctttctcttccgcgggaatgaagctaccctgccgccatgatgcaggattcagaggtcatcaaactcgtcaagcccgtgccttccgaccgcctggcgacccaggtgctggtgatgtggtacaatacggtgcgccccaagtggaagaaaccgctggatctggccatcaccgccttttttgtgctgatgacgctgtactccttctccctgcgcccgctgcccatattcgcgtggctgtccctggccggggcgctgatggcgatcatcctgtcctggttctatgttccctttctggcgaaggccgccctggccgcgaacaagaaggtgcccatgtaccatcaggaaaaggattacgtcttccatgaggattacatgactttctccagcaaggacgtcgagcccatgaatatcccctacgaccgcttcactaccctgtgcaagacgcgccacgccctgctgttcctgttcggcaagaagctggtgctgtggttgccgctcaagctcatgagcacggatcaattggaaagcatcatgcgccggttccggaaccacggcgtggaagtccgggatatttcctgaggcggaaagccgttcggggccgttccggaaggggctcaaatttgccgtttccgcgccttttttgttgagcgcggggtcaaaacgggtagggtgtctccatgtcacgttacaatggagaacaggttctggtggttccccgcgccacgtttgaagaagcgggttatttccagggacaccgggaaggcggggatcattatctgaatgcgttcatgaagccgggggtctcctccttcatggaccgggaggcggcggaaaacgacccctcccacaagcagatcatcgcctatgccattttctgccaccagggccgcatcctgcattacacgcgcggcggctccggcggtgaggcccggctgcatgacaagggctccatcggcatcggcggccatatcaatccggtggaccgccagtccggccatgacgatgtttccacctatctggccggggtggagcgtgaaatccgcgaggaactggttattgacgggagctgcacccagcgggtgctaggcgtgatcaatgacgattccaatgacgtgggagccgtgcatctgggcatcgtccatctgtttgagctggatacggaccgggtgcgcgcgaatgaagccgcgctggccaatctccgtttcgtggccccggaggaactgtccggggagatgtttgagaagctggaaacctggtcccagcttgcgctggagctgtttaaaaacaggggagcctgaagccttgcgcttccatgaagcgcccggcgggcgtagcaatacgcctcctctttcgtttccttccatgggaagcccccgcggcatacgcctgcgggggcttctttcgtccatcagggcctgaagaaaacaaagggccgttaatggaagatttttctgcgcctgcgccacagcagggcggccagtccggccagacccagggaagcgctccccggctccggcgcctgggcgaagaccatggcggaattggcctggaggtccgtggacatggccgcatcatacagaatgccgccgttcaggaatttgatgttgtccagattggcgggaatctccgtcagggaaagcgtgtagtggctggtgcccgtaatgtccacgatgactttgtccgcggtaagtccctgaagagtcagggaggcgtgttccccaagaatgagcgtggtcatgtctgaaactccgttcaggacgagtccgcttccggcttcaatggttacggtgagcgctcctcccagggaatccagcgtggtgcgggtctggttgacggcggaaacatgggtgaaatcgctcagggaagcctggaaatgctccacggtcacatggtccagcaccaggcttctgccgccgctcacattcgtgccgccgctgatggttccggcatacttgtcaaaaccgtaggccgccgtcccggaggaaagatcctggatgcgcacgatggagctgccgttgacggcgccgccggaaccgcccccggagatactgctccaggacttcccgttgtgaagcgtggcggagtttccggccacggtgacggacgtatttccctgaacggtgccgccggagcctcccgcatacacatctcccttgatggtgccccctgtaacgcgtaccgcgcttccctcccggatggagcctcccttgcctgcgccgtaaacggagccggcgatgactccgcccgtgacggtggcgttggaaccgccggaaatggagcctgccaggcctccccccatcacgtctccgttaatggagcctccgttgacgtaaacgtgcgtggctcccccgatgctggtcgtgccgttgttggcattcgcgtaaatgccgcccatgatttggctggaaaaagagccggagttaatcacgatgtccacgttccccttgatatccgtagcataggatccgaccacggaggaggcgctattgctggtgaaggtgccgaaggaggcgttttccgcggagaattccagataaacgtttccggtcacgccggaggcgttcacggcgccgaagacggtgcttccgcccgtggcggcgtccgtaaagcgcagggcggcattcccgttcagcgttccggaatttccatgggccccgtaccaggcggaggcctgcccttccttggcgatggtcagccagacgtcccccgtataattgccggtgctggcatacacatgcgtggcgtttccggaagtgatggtgacgttcacggagtttcccagcctcccggaggaggcgtccgcctgggcgcgggcatcgaagacgccggagcaattctggttggcggcggaatgcgtgaagccagtttccggccacgcgatgttgccctccggagtgcctgacgagcccccggagtccgctccggcggaaataaaggcgttctcttcattgaccagcccggaagtgggtggggcatacgatcctgtaccatccatggacaggtctttcaggatggcgtttccgctgccgtcatactggatgatgacgccgttgctgccggaaccggaggtgacggaaagcgcttccccgatcagcatgtcccccagccagacgtaatagccgcctttcaggccttcctgctcattgcccgtgacgtacgccatgcgcaggttttccgtattggcggacatgtccagggaatacaggatggtatccccccatttgatataggcctcgttaatgttgagcgtgccgtaaaaagagccgttccccaggctgacgctgaactggtccgagagattccagccgtttgccgccccgtctcccaggaccaggttaaaatcaaaggtaaagccgtttttcagggccgttccctccgtccatgtccgggaaatggaacttgtccccgcctgtcccaggctgatgccttccgcgttcacgccaatgttggatacggaaaagcccgcatccgccaggttctgcactccgttccatgcgggcgctcctgcgccctggtggaagttgacggccatttccccggcgtcccggcgcagttgtccggcagagcggcccgcatagcccatggctttggcgatgttgccagccatgagcaggtctccctgggcgttggggtggagtccgtccgccgcgggattattgaacatggaccgcaccccgtaaaacggcttggaggaagccacgtcgatgatccctctgttgacgtcgatgaccgtgacgccctgcctggactgcccccaggaattcagggaggcgttataggtttccaccgcctggtgggtggcgtccgaattgccattggaatgctgggtccagcagggaatggttagaacgatgacgttcgcgctgccgttggcggcgtgcatggtgtctacgatggcgtccatgtctgccagaagatcccgggtgactgaatcaagacggctgtccagggtggaattggcgccgtcggagagaaggtcgttggtgccgatcatcacgaaaaaggtatccggcgtgtccgttcccgtgaaggtcgggccctggtaggctgctccgtttgctttggcatcggaaagccccagccagttggagatgttggagccgtcaaacctgcttccggttttcctgccggatatttcccaggcccttgcgcttgcctgggaggaatgttcgttgttgaaaacctggccgccgtaggaggttcccgcggtgacgcctccggaattcacgccttccgcatggtaggaaatgccgttgtccgcaaatattttatggagggcccagcggtaagtgccgctgttcatgccgtgggtgatggaatcgcctacgtacatgacgttgcccaggtccgtgcccgcaggggcggcgatggcggaggggaaagccgccagcagggcggccaggagggagagagggagcctggttttcatcaaggggagcaggggaatgaaacggatgtttgaaaaaagtgaataaaacggccatccctgaatggacagggatggccgtggctggaagagactaggctctccggcggcgtaccagcaggatgcccaggcccagcaggccgagggaggccgcggccggctccggaacggcgctcaaggcgtattccttcatctggtcttctgtcagtgctcccaggtacaggtcaaaattgttcagggtatattccccggtgacgccgtccggaggagtccaggtgtttccggaaccgtccttggcggaaaaattgagctggttcatggtgacgctgccgaatttgaccccggagccgttcagggaggccagagtggtcagggtggacgtatcgtcccccagcatggcggaaatagtgacattcccgtcattgtatgtgtaaaacagggtgagagcctgtcctgcggaatagccggaaagcgtttgcgttttccagggggaggtgcctgccgtgcctccgttgtagttaaagccgcctgcgcacagagtgagatctcccgactccgtcagccggtagcccatcccctccaggttcttataattggatgtggtattataggtaaacagcaggcctacatccgtccccgaggtggtgcccaggtcggaaatggtcagggccatggtccatggagtggctccggagccggtatgcacgggtacggagggagaggaaacattcagggtgtctccgttgtttccgtcataaatggtgtaaccctttgaataagaggaatccattccattgatggaagcggcgaaggatagactacctcccagaacggcggccaggagggtcaggtatgtggtcttcatattgattgctgtacggattggagaaatgttcccgcgcaagagaacgtccgttttttatcggattcctaatccgcttgtggacccatccaatgcaagcatggataaaggctagagaatcatgggaaaaggaattgtcctgaaaagaccagatcttttaaattatgatgaatatcaatattttatgacaaacaatacatttaccgttaatatttttaattgttgacggattaggaatccgcccaggcgcttgaaatcagctgtaagagcaggagcagtatggagttgcccgtaattatggaatagaaaaatcgtggataattaattcctgaaaaagacgatgcaattcttttacgccatcttgattgtaaatgaattggttccaaatcaattccaaaactgcttccgtcccccgcggaacccgagccggggaaagggaaaaaaggaggtgggcaggagatgcgatgcccggcaatccgtgaagcggcgaaaacagtggataatccattgatcgtcccgctccggactcatcaatcccttctgccggaagcgggaagaccgcggatgcccggcctgccagggactgggaaggcggcgcgtctgttttccgctccgccggagagcaaattccccggcaagcttgtacttgccggggaatgaaaaaaacagtcaaggaaactcccgattttaagggaggagcgttttttatcgcttgggcgggccatccatgatagccttgtggctcatgttccagccgccgcccagggccgtgtacagggaaaccagcgtgctggcgtgctgatagtagtactgggaaagctgaatctgcgcagggtacaggttctgctgggcgtacagcacttcaatgtagttggaaaggcccgtgcggtagcgctcaaaggagagcttcaccgctgtttggtaggcttccacggcctctgactggatggaggtgatattgcgcagcttggcccgctggatgagcgtgctggagacttccgccagggcgttcagcaccgtctgttcatagtcgttgctggctgccaggaattcggccttggcagccttttcggaagccgtcagtttgcccgcctggaagagggggccggtcaggttggttccaaagccccagccgccgcggcgcccctgcacgtggcgcaggtctgcggaggccaggccgccggccgccgtcagggaaatggttgggaaatagttggcaatggctacgcccacttccgcgttggccgcgcgcaactggtattcgctctggcggacgtcgggccttctggaaaggatgtaggccggaatgccggcgggaaccttcacgttgtaggcgatgtcacgggtgctgccggaacggcggatgcggccgggagcgcgtccggccaggacggagaccgcgttttccagattggcgatctgcacctggatggcgggaatctgtgcctgggaggaagccagggcggccttggcggaggctacctggagcctgtcgcccacctggccttcaagctgttcgtcgaacaggcggaggctttcggaataggattccacggatttctgcacaatggcaagctgttcgtccagctggaggagctggaggtaggagtcagccacctggcggagcagggagagcatgagcgcgcgctggccttcttcggaagcgaggtagtctgcgcgggccgcttccgtcatccggcgcgtcttgccccagatgtccagctcccaggagatgccggcgtcaatggatccgggcgtcaaggtattgccaacggcggaggtttggaccacgttgccgctggtgtagttggagcccttgctgagggagccggaataatccgcccacgggaagagcggggcttccgtgatggtgatgtactggcgggccttttccacgcgcgccatggtggccttcaggtcacggttgttttggtaggtatccgtcaggaggtcctggagatccttgttcttgaaaactttccaccagggcaggtccgcaatggactccgtggccgcggaggctcctctgaacgccgtgggcatgggcatgtccaccggcttgaagtcgggacccatcatgcaggaggaagccgtgatggccgtgcccagcaggatggcgcgtgtgatgtattggttcggtcgcataatggcgttttgtctgtttttaaatggtttcaagggcggtttttaccctttcagtgattcatgggcttcatggaagaggtgcttccgggcgatgatttcatccggatcctccgtttccaccgtcttccgggcgatgcggacacggaaaagcttcatgatgaagtagaaggagcacgggatcaggaagacgcccactaccgtcgccatcgtcatcccggcaatcaccacaataccgatgatgttgcgggagtaggcgccggaaccggaggccagggccagcggaacgcagcccaggatgaaggcgaaggaggtcatcaggatggggcgcagacggattctggccgcggagagcgtggcttccatcagcgtcttgccgcgttccatttcaatgacggcgaattccacgatcaggatggcgttcttggccgccaggccgatgagcatcaccaggccgatctgcgcgtacaggttcagttcatacccgaaccagtacaggcccaggaaagcgcccagggccgcgatgggcaccgtcatgaagatgctgagcggcagggaccaccgttcatacagggccgccaggatcaggaagacgaagacggaggagagcaggaagatctgcacgatgccgatgccgttctggatcttttgttcctgatagctcatgtctgcgtagctgtagcccatgtccgtgggcatgctggcctcaaaggtctgttccagcgcttccatggcctgggagttggagtagccctgggccggggtgaccatgagcttggaggagttgtacaggttctggcgcagcaggaattccggacccttgatgtccgtgatcttcacgagggtggagagggggacggaactgcccgagtcattcttcacatagaagttcttgagcatgtccgttccggtgcggtcgctgccctgcgcctggatgtacacctgccattgctggccgtacagggtgatgtagttgatgaacagggagcccatgtaggcctggagcaggctgttggcctcactgatgctgacgcccagcgtggcgcacttttcttcatccagccgcacgtccttctgctccacggcaaaggacatcacgctgcgcacgccgccgttcttctgcgggtcgaatatcgggagcttgcttgcttccttgacaaagatgtccgtttgttccgccaggtattccgtgcccttgccgtcgcggtcttccagcatgaaggtgacgccgttggcggagcccacccctgcaatggccgggggctggaagcacatggggatgccttccggaaccttggtgctcagcagggcgttgagctgggcggtgaccgccttggcgctctggtccggattggggcgttcctcccagggcttcagcatgacgaagaagaaggcgttgttcgtgctctgcaccccggtcagcaggctgaagccggaaatggcgatcacgtccttcacgttcgggttctggcggatgaggtctgaaaccttgtccgcggcggccgttgtcagctggagggagcgggcttccggcatgatcagggcggagaacaggtaaccctggtcttcgtccggcaggaagccgttgggaatctgcttggctacgggcaggatggcgtacgcgatcagggccagcaggggaatggagatgatgagcttgcgggtcaggaagtggcacaccttggtgtagccgctggccgtagcgtcataaccgcggttgaaaatgcggtagaagaatttcagcgggccgcccttgttcgggtccttgggcttgagcaggatggcggagagggccggggacagcgttagcgcgttgaacgcggaaatcagcatggaaatggcgatggtcacggcaaactgctggaacagcgtgcccgtaatgcccggcagcagcagggagggaaggaacaccgccgccagcaccagggcgatggcgatgacggggccggacacttcctccatggcggcgaaggccgcctggcgcggagtcagcccgcgttccatgtgggattcaacggcttccaccaccacgatggcgtcatccaccaccaggccgatggccagcaccatgcccatcaaacagatggtattcagggtgaagcccaggagcgggaacagcgcgaaggtggcgatgatggagaccggcacggcaatggccggaatcagcgtggcgcgccagccctggaggaagacgaacaccaccagcaccaccagcaggagggcttccaccagcgtgtgctcgatttcctcaatggaggcgcgcacggccagcgtggtgtccagcgtcacgttgtactccatcccggcggggaagctgcgggcgcggtcttcaaaaagcttcaccagggcgtccaccgtattgatggcgttggagccgggggcggcatacacggcgatggcgcctgaatccctgccgttgtatttactggatacgttgtaggtctgggaacccagttccaccttggcgatgtctttcaggtaaaggagcttgttcccgtccgcacggatgatgatgttgccgaattcctccgcagtctggaggcggcccttggtctggatgctgtacgtgaattccgttccgggaggggccggttccgcgccgatctggccgccgggaatcacggtgttctgcgcccggatggcggactggacttctcccacggagatgttctgggcggccatcttggtggtgtccagccagatgcgcatggcgtagcgtcctgcgccgaacacctgcacgtcgcccacgccgggaacgcgcttcacggggtccaccaggctcacgtacgcatagttgctcaggaagatggcgttcaggctgtcatccggggaatacaggttgattacggccagcgggctgcccgtggactgggtgatggtgatgcccatctgggagacttccgcagggatctgggcggtggcctgcccgtagcgcatgtaggccagcgtctggtccatgttggggtccgtgcccacttcaaagacgatgctcagggagcagatgccgttgttggcgttggtggaagtcatgtagtccatccccacgacgccggaaatggattgctcaatgggggaggccacggagttggccaccgtctccgcattggcgcccggataggtcgcctgcatcttgatggtgggcgggacgatgttcgggtactgctcaatggggagccccatcagggacagtccgccgagcaggatcatcacgatcgagatgacgatggcgatggtcgggtgtttgatgaagaagctggacatggtattaaatcatgagagtgcgcgggaaaggcggggaggggagaggggcttcccaggagagggggggattatttggcggcgggctgggcttcgtcgtgcttcatgccttcgggcgtcttggccttttcaaaggactgcgctcctacggaaggcatgacgggctgggaaacgacaggcttgtagggcaggggcttcacgggggactgtccctggagcttggccgcctgcatgattccttccactacgatggggctgtccttcgtgaaggaggagtgcggcatgggaacgatgttgatcacctgcatgccgtccaccacgggcccgaggttcaccacctgcatgtggggaacgttcttgtcatccagataaatgatgaatttggcgctctgggcggagaggatggcgcgcgggggaaccagcgtggcgttttccaaagtcttcaccgtggcgcggacgcggacgaacatgccgggacggagcgtcaggttcggattgggaatatggcccacgatgttgatcgtgccggtctgggcgtccacgtttctgtcaatggctacgggttcgccctgcatggggaattccgtgccgttggccagaatgacgtcaaacttgaggtgcttctccttggccaggttgctgtccatggagttcaggaagtcctgttcactcacggagaagtccacgcggatggggtcaatggcggaaatggtggtcagcggattggggctggagggcgtcagcaggttgccgatggaaggagttgccaggcccgccagaccggaaatgggggccgtgatggtggtgaatttaagattgattttcgcttcgtccacctgggcctttgccgtggcgatggcagcctccgtttcctggacctgctgcagggcgtcatccagctgcttgcggctgacggagccggtctttaccagcggcgtgtagcgttccacgtccagcttgtatttcttcagcgtggcttcatactgttccaggcgcccctgggcctggtccagcgttgcctggaacgggcggggatcaatctggaaaagcacttggcctttcttcacataggcgccgtccttgtaatccttggaaagaaggtatcccgtcacctgggagcggatttcagcatcttccgtaccgcgcagggtgcccacccactcctgcctgatgggaacgtccctggttaccagcttggtcacctgcacttcgggaacgagcgccggcatctggcctgctgaatcctttttcccttcacaggaagttaaaatcatcaccggagagcacaggagcagagttgtggcggcaatcgtcaaaggcttgttgtacataaatggatgcggttggttgcaagctggtgccggaagatgcggcagagcgagcaaattttgcttctttttctcataaagtcaacgcaaagatgtgttctgattcttgtgaaatatccgtaacctttgcatattgaagggataatttaattaaacaaatgtataatatgttgactcctccatgctcctctgcggaggcggaacggcgctcctctccgcgccttcgttcaggaggccagccgcctcttgcggagcatggcgtccatgcgtggttttctgcccatgaaatccatgaactgctgcatgggcgggaccgtatatcccttttccagaatggccttacggaatttccgggcggtttccctgtccggtcctccggcccgttcaaaagcttcgaaaatgtccttgtccagaacttccgcccagcggtaggcgaagtaaaaggaggcataacccgccggggaggaaaacaaatggcgcgccgtgcgcagcttgccggttcgtttgaaatccttgaaataatccatgtctccggctacggcggcgtccacctcgtccagggggccggcggcgaagcgttccgggtccgtgtgcacggccaggtccatttttgcgtacaggagctgcccggccagggcgagggcgggcgtattgccgcgggaagcgtccagggagcgcagcatttcctccggaatggggagccccgttttttcatggcgcgcgaagcttttcagcacgtccggatgccagcaccagttctccatgaactgggagggaacctccacaaaatcccgcggcacgctggtccccgccagggagggggtggaaacccgggtgaacatcaggtgcagcaaatggccgaattcatggaacagaatcctggtctcctgatgtgaaagaagcaccgcggctccttctgcggagggatgaaggttcaggcagaccatgcccaggcggggcttgcccgggttttcccgcgtggccgggctccccgtgtccagcgcgttcatccatgctccggcccttttgcttttgcgggaaaagaggtccaggtaaaaggatcccaggcggttgcccctgacgtcctcaatggtgaaaaagcgcacgtccggatgccaggtccccacggctcctgcgccttcccctgccggaacctccgccacgcggatgccgtataactgctccgccagggaaaacaggccgtccagcacgcggggaagggggaagtaacggcgcagttcctcctggtccagccggaactgttcctttgcctggaggctggtgtaatacgccacgtcccagggattcagacgggcgttttcctgtctcgtgagacgggccttgagtcggcgcagcgcttccatttcacggaaaaagggggcttttaccttgtccagcagctcattcacgaacttcatggcgttttccccgtttcccgccatgctctcccgcagggcgtaatccggatacgttccatacccgcacaaatgcgccttttcacggcgcagggaaagaatctcccggatgacgggttccgtatcgcatgctcccgtggcgacggtctggagatgttcccataaatccttccggcattcttcgcggtgcgccttctccatcacccgggcggaagccgcggaatccagcgtaaacgtccagcccgggccggaatggcctgggctgcgtgactggaactcctcccgcgcctgttgaagagcgttgttgtctatcccttccagaaaggcggcgtcccgcaccgtccaggtccaggacttccgcgcgtccatgtacagattgttgaaacgctgtgaggcgagagtcaattccctgtcaattacctcaagccgcgcgcgcttgtccggcggcaggtccgccccgttgtcccggaagctctgcatggtcagctccatgtaccgtttctgttccgggcccggattggtctgccgcaggcgttcctcagcgattttcaggacgttccacagggcctggtccttcgtgacggaggaaaggaaggcggacacgcggggcgcaaccgaatccatggccttgcgcagttccgcgctgtcgcacaggcttttcaggacataggccttgcgcatgccttccatgaggaggtcattgctgcattccagggcgccgaacgtgttttcatacgtcatttcctccggttggagacggctgatctcttccacggcggaccgggtgaggcgcatcgcttcccggatgtccggttccagcctgtccggggtcaggcggttccagcaaatggggcggctcttgtccagaaaagggtgggtggaagaatccgccggagagggaagggccgcggaaagaaaaaggagaaggagatggaaaaactgcctgggtaaccgcatggcggctatcctaccggaagccctctcccccttcaagccttgtgcttttcgtgtctgcatccggggaaaaaccgggccccggtcttgaacggaaccgcgtttgcatgtatgaacaaaggcgatgtccaccaaaattttcctctatgataccacgctgcgcgatggagcgcagagtgaagacgtcaacttgagtgcgacggacaaggtccgcatcgcccggcagctggattatctgggcatggactacattgagggcggctggcccggcgccaacccggtggagacggaatttttcaaggccatgaaggacgtggagctcaggaatgcgaagctggccgccttcggcagcacgcaccatccgtccagtacgccggagacggaccccacgctgaacgccctggtttccagcggcgcgcgggtggccgccatcttcgggaaatcctgcccccgccatgtggaagtggcgctggccatctcccgggaacgcaatctggaaatcatcggcaactccatctccttccttaaaaagaatttggaagaagctttttttgacgcggaacacttttttgacggcttcaagcgggacccggaatacgccctggccgtgctccgcgccgcccatgagcacggcgcggactgcctggtcctgtgcgataccaacggaggcaccatgccggaggaaatcggttccatcatccggacggtcagggaacgccttccgcatgccgccctgggcatccacgcccacaatgactgcgagctggccgtcgccaacagcctggccgccgtgaacagcggggccgtccaggtgcagggcaccgtgaacggcatcggggaacgctgcggaaacgccaacttgtgctccgtcattcccaaccttcagttgaagatggagggcttttcctgcctcagtgacgcctccctgacgcgcctcaaatccaccgccgccttcgtttcggaagtgtccaacctggcccccttccggcggcagccctttgtggggaacgccgccttcgcccacaaggggggcgtgcatgtgagcgccatcatgaaggactccgccctgtacgagcacattgacccctccctggtggggaacgcccagcgcgtgctgatgacggagcagggaggcaaaagcaacatcctttccctgtcccgtaccttgggctttgaactggagaaaggggacccgcttctggacgtgctctccgccgccgtgaaaaaaaacgctgcgctggggtatgactacgtggccgccccggccagcgcggaactgctcttcctgcggcacatgccggacagcgcgctgaagccgtacttcaacatcctgcgcaccgtggtgcttacctcccgccatgaaatggatccggacatgatggtggaagcctccctcaagctggacgtccacggcaacgtggagcacaccgccgccggaggcttcggccccgtgcatgcgctggaccgcgccctgcgccgcgccctgacgcgctggtacccggaactggaacaaatgcacctgattgactacaaggtgcgcgtgctctcccccacccggacgaacattccggacgcggcggaggaaaatggcaccggctccaatgtgcgcgtgctcattgaatcctcggacggcgtcgccacctggaccacagtgggcgtctcctacaacatcattgaggccagcctggaagccctggcggacgccgtcacgtacaagctctacaagacggagcaggccagatggcgcgcggaatgctgatggacaggctccctggaagctgactgcctgacgatcttatattctctctgaagcgcacggcggcttccggcagggagagaaggcgcgctccggataaaattcatttgaattttacttcctccggtgttggcatatcttccggcaggtcaaaaggaaggactacaggacagttgtaatcaagtataccgggctcctgcttcatggtcaggggacggctttcaggtttaaaatgaaatacctgggcattacttgggaattcagttgcataacgatgatgttctacatcatacatcaatgtccagttaacggcggaaaaaatgccgtaccgtttattcgttccatgctgatcccttctggtgtattcgcccagcagggcgattccctggacaaccacgcataaataagggtagcttcccaggtttgcggattgttgccgtccattgcggaaaatgagttcctgactgaatggaatgatcagcactggaagctatcctttggaaccgggccattccgggaatgcagataaatacctccattcccgctgtatgaccggcagttgatttctcatgaccgtccataaataattaaggcaaagaggctggtttaacatcatccataatagatggggaggcatcgtattgcggttgtaggcctctacaaattcctcgccgcagctgcgtacaaaactcaattcccaaagctgggaggtcaagttaaagcttcgttccatttcacaccattccaccagccgccgatagctgtaaatgtggctgacctcctcccggttaatttccaccaataccatcttgttgtttgaagacggcatagagagcaaattggcgtcggcatggatcggttgggctagtatcaacccaaaaaaatgcaacaaatgaacacaacgaaacaattaacaaatatccttttcatttttccttcttggaaaatcttattataatgtaaatcaataaatatgtccgttcattattgcaattgaatttaaaaatcttccacttgataatgtattttatgtagagaaactctttctttgaaatggttatatttttctttttctggattgcatcaatctttgttgaaatcttgtttcacgagaatttttttattaccgttttcaaggattaaaaaaacgggaattgactaaaagttcgactttttattttccaataggattctgatttcttccgtttcctcatcctgtacctgttctgtcatccctctgtttttgccaagatccatgaaatagtaaataactttttgtaaatcagatggaatctcattaaacgcgaaccagggataggaagaagagaatcgaaattaagtaataattaatggaatatattccattaatattttatgattgcatttgtgtctacaataaaaaagaatcctatatttttctatttcgaaagaataagtttaatgtatggtttgatgatttcttttattgtttttttcctatcctcagaaagatcaattggcatatattccggaatatcgcccattggagtaatatcaatggagtattctccttcctttttgctaataatatttaatgataaagaataggaaggatatacatggacacctttatttattaatggttttttataagaaacagttgtcagtagattagctatacgttctttatcgttattttttaactccagttctctttttccttcgtcgtcggaataatataacttaatgctgctacaacatttagatatttttactatttctttgaaggtgtttttttgcatttcaattatatctttatcttccccatgagaaatcgaggtaattaaaaataatatagataatactatagaatattttttcataaactatatttttatttgaggataaatctcatctactacttttcttgcagatgtttctccaccacaggaaggagctgcagaccttgttgcaccttttttaacacattcgtcaaaattaggaattgtattatgcaaaaccttacatctaccatcatatttatatgctactatttctctctttaccatttctctacatcctgtcttgccaggcctttcgcattcctgatatgcatgaatatattcatgtgttaaaatttgctctaatgttgttttgtttttaattttattgtaataaatatttatgatattttttattgcataataaacacctaaaaatgtagactttttattcagattgcacatacatatcgttgaaggcaatgcacattttttattactttttatagctttaattgaagcttttagatatccggaaggattattcaataaatattgaacttctttagtgcattcttggtaggttatttttcctaataaatcaaaatcaataatagaattatttcttacaaacccatacaaattccgcccaccctgttccgagataggatccctgctaatccatcttccgtctgtgggattgagataacggtaattataatacacaagtcccagttcgtcgtctacatattcacaggaaaaacgaaacttgttttcctgagccatgtctccttcagtagccagcagatcaccaaaggatgcatattcatagagagcccttctcgtctgctgtccgtcgaagatggaagtaacatttttaatggcatcgtatatgaagtaaaaatgtttatcaatttccttaccgctgttcttccaatagttcactgccaaaaggcgtgtggccatgggttccgtcgggtcccacaggtagctctttaccagcaaaggttcgggatgcgtcaaatccagttcagctacctgcaggtagtcccggtacaggaaccggcaatggctggatactgccccattgacggagaccttcttctcgaagcgccttcctcggtagtcgtagccgcaggtgatggttgttctgccatcctggctggtgaagacgatggggcggtcgttggcgtcgtaactgatttcccagatacctgtcgaggtcctgatgcgggtctggttgccgtcggcgtcgtagacgggggtaaaatgttcttctctcccggcaatctccgcgtactggttaagacagttggcatcgtaggatacttcctcttccagttcccgagcggttttgcggttgccgatgttgtcgtatcggtagctgaagcatcctccccggctgatccggtcttccaccagctcgctgcggccattgtaggtaaaatctcttagcgcggcaggagtggcgacatcccaggaatcacgtcgctgaatgggacgccccagggcgtcgtagtcgtattcgtggccggctgccaattcgccgtccgctcccttcctgtaaccgatggcggttacgaggttgagcctgggatggtaggtattgcagcgggccatgccgttggggtaggtgagatagttgaggaagccgctggttggatcgtactgccaggtaaagggatactccagtccttccagattcatcccgatgatggcacctttggaatcgtagtcaagatgagagtgctgcaccgtgcgtgtgccgaccatcaggcggtagccttcagaacgtcccaagacatcatattgttcctgaatggagctttctacggttccaaaggaagtgtcctggattatgcggccataggcatcataggaaagttccctgattccggaggcgtcccggacggaggtcatttgtccgaggtggttgcaggagaactcccatcctggcgtaccgtcactgtgggagacggagacgagttccccggtgagaggagcataggcgtaggtggtggtgattcctctggccttggtcaatgtctccagacggttgagagtgtcgtaggttttcgagacacaggacccgtctgcataggtcttcttgagttcaagccccgtagcctcgtcatggagccacgcggtggtgtctccgtcagtacggccgcaaggatcggaagtgatgtctccctcatctgcccggaaggtagtcagggagaccatgtgatcggcttcgtcgtaggcgaagcaggccggctgggtggcggtgccgtacttggccgtctttctgccgcgtatgtcataagaatagcaaactgttccccccagggcgtcgatgatgcaggcgggattgtcacagcagggcgagtagctagtggtagtcacgtttcctgcagaatcggtagttttgacaggacgtcccgcaaggtcggtttcagtcgtcgcggcattgcctctggagtccgtctgcttgagaaccatgcccgtggaggcgtaggagcgggtttgtgaggaacggattccggagtggtcggtctggcttacggtaaagccgtccacgacaagagactcggctaccatgtttgaagtgggaatgcggctgaaccgggtgcgcctggtaggagcggtgtactccgtccactcgacgctctgctgtccgtagacgtccgtggaaatggtcttgctttccaggaggggatcgagcagggaaaccatattctccgtgatttgagtaagggggagaccgtcggcattgtaggtggtggaagtctgcacctggcagacgccgtcttcccggaaccggtaacaggaggagtgctcagtgattctgtttttagcagggttatcaggatgtaactcgtccagcaggacggttttcttcatggcctgccccagttggttgtattctgtgatagtaggagcaaggttctccgtttgagatcggatcaattgtcccttgtcattgtatgtattactggtgacgatgaaccctcccttcgtattgggctgttcctgccggacggtctgtccaaagccgttttccagagacctcgacagcacaactcccttggacaaggtcgtggtcaggatgccttcttcggttagttccagctgggtctccatctctctttgccctgttcctccttgtaaggtggttgtgccgtcgtagtaggttcgagtgaccagggtagcccctgcaggagtggtgacggtggtggtgagtccgtcttcgccgtactcggttcgggtggtgcgtcccagtaggtctatggaggaaacgacccgtccctgatcgtcgtactccgtcctttccgtcgtcgtcatcggacccacgtcgcgccgcacggcgatcgtccttcccgccgcatcatagctgtaggaggtaatcatttcaggggtggtttctgtcgccgagcggatggtttccaccagctgcttggccgtgttgtagccgtagctggtggtgatgccgtcttcgtcggtttccctcaacgggccgcagcacatccactcagtcgtactgactctgccgttgcccttcgtcgtcttgacgagcctctgttcgtcatcatattcatagtcctccgaggcaatcagcgaccagccttctccggtgtgaacgtattgttctttcctggtagtggtgccgttttcagcgatgtattgcacgtttcgtgtactttgtcccggaacgatgcttccgttggcctgcacggtctccgtcaccttgtggacggccccgtattccgcggtggcttcgtaagtataaacggtttgcaccccgtcaatactctggctcatcttccgcctgccccgggcgtagggatactccgctgcctccccataagtctcttccacgcgggtatgaacctggtcgcttcccagcgcggtttccgtcacggtcgtgcggctggcctgcggactgtcttcataggtataagtgcgtttgagaagcgccgtttcttctccattctcggcaataattacttcggtttccgtggcgggcctgaagtcgttgaagcgcaagtcggcgtaagtcgtgcgtgtccccttttcgccgcctccggcccagggagcagcggaaagcacggttctgccctggtcatcgtactcgtagcgcgtgtaccctccatcgggcttgatctccagggacacccggaactggtcgttgtaggtgtaaagcgtagtctgggccagaggggtgttgtagccctgggtgctgctgatggtcagccagcctccctcggtgtacttcttgactgtacgcgtgcaggaagaaggtgtttcctcgttgatgccctgaatagtttcaatgcgctcccacttggaaccgggcagcacgtttttctccaccgttcgcacggtgcgctcatccccctctccctgaatggtcgtcaccttgttgccttccgtccttcgctgcgtccggaagacaggcatcccctccctctgttcggcgatatccatcacctgcacgccctggtcgtcactcagttcatagctgaccgtcttgtagggagttccggtgccggcaaagccgcgcgcattcttgctcacctggccgggagcgtaccattccagagtgagcctgttgccttccggaaccgcctggagcagtccccgggacttggaccagatgctttggatggctcccgtggaaggatggcggttcaccttcatctgccgggaataagcttccgccgtggtttccacgccggaggcggaaaccatggagacgacctttccggtggctgccgagaagcgcagggtgcgcccattgctctggaccatgtccagataggcgggagagccgccggtgcagggagacttgtcggcattcagcttccgaaccttgtagttcaacttgcgcgaacttcctgagacggaggctccggcatggccgtcagaactctggaaggagatggaactgcccgtgggtcgtttgacggagatctgtccggtttcgggattgcaggaggcgctccattcgaggggatgcttgtagcgcagggtgatggaagagagggcggaaggttcggcaagggtgcggagaagcgtgggattacctccttcacttccgcctccggaatcgccctcgcccacttcaagcaatccttcgcagtcgtcggctccatccgggttgccgccgaagaaatgggaggtgttcttgctgcaatcggactgttcgacgtcttcgtcacaatcacaggaacagggacatggacaacctccttcctccggctcgctggaggaagaagagagggaacttgaactgctgctggaagaagagctggagctggaagaactcgatgaacttgacgaggaccatgaagaactgcttgacgaggaagagctggagctactcaaggaacttgaagacgaagaactcgaactgctggaggacgacgaactggaagaagaactgctggaactgctggaactgctggaactgctggaactgctggaactgctcgaggaagagctggaagacggagcgctgctggaggaatccggctcctggggcaccaaggaactgctgtggaaactggaagacgaccagctgctcgaggaactggacgaggaagaactggagctgctggatagagacgaactggaagaagaatccggaagctcgggagccgaagaactctgctgggagctggaagacgagctgttggacgaggaagaactcgaactgctggaagaggaactggagctgctgcttgacttggggtcaaactcaaaggaatctcctccccctgccgaggaactgctcgacgagttcccttcctcctcttcctggtacaggttgaccagggttagcacggtttctccttgcctgctgggaggcgtgttttccgccagcaggtaataatccaggtcgggctcgccttccttgtcgcacattaaggcaatgcagaactcggcttccgacccctggtcgggctggtgttgatggacgatgtggcaccagtaatatccctggtcgaactggatctggcggcggagaggggtggaaggacccggctccgtggagagttccagatccttggcgggaatggaaagggagatggaagagtgggcgtggagatggagaaaacaggtggagggagccatgaccttgaggtatccgaaccattcgtgccgggtgttgttggaagcagttcgtttggggataaggacgggagcggagaggccgttgacctggaagtcgccctggggctgtccgttggggtacatgggaatgaagggatagacggtgtccatggcaccgatgttgaaagtgttgttcatggtaatgaaatgatgtttgttcaatggttgcgactaccatgaatcaaaaactaacaacgtaaacacgtcgggaacgttacctctaaatattaaagtttatgagggaaaatttgactccttttcaatcactttcgatcgaaatttggatatctgaaaagaggtataaatgaggaaacatggcgaatgaaagagggatataaaaatttgttgaaagagagaacccggggattccatggcaaataaaacattgacccgccgagagggaaactctatcctgaaagcctcattcaaccggaggaagattacagccgtggaggacgatattatttgtacagaaaaaatcattgcggaacgcaagacgttctttcttgatctcaaacagaatgcgcgcggcaaagtggtgcgtattacggaaaaggtgagctccaaccgggaccggattatggtgcctgcggaaattttggatgatttcatcgccgctctccaggatatccgggagaccctgaagcagcagggggaataaattttccccctccctcctgttctttatttcaccaatagcggggctgcggccgtcccgccatttcttagtatccggggcattgcaaatccggcgggcaaaaagccgttttgtctgaattaggcgttgtcaaaaataaaaaagggagtatttttacttcccggttttgccgtccccttttttcatattccggagcattctgcattccggaggcgcggggccggaatgttgatgcaaccatgaatatttcagagatatgacgacacaacaggaattgactccggaattgatacgggctgcgctgaccacggtaaaatttccggggttcagccgcgacatcgtatctttcgggctggtgaaaaagattgacattgacgctgaaaacaacgtcacgattgatttggtgattgagagcaaaaatgcggatattccccgttacatttttgaaggcgttcacggcgtgatgaagcatttgcccggcgtgaagcactgcgacgtcaatatcgagcataaggctccggaagccaaaaaaggaatcaatgacgatccctctacctggaaatcctccgttcccggcgccaagcacgtcattgccgtggcttccggcaagggcggggtgggcaaatccaccgtttccgcgaacctggcggtggccctgagcaagctggggtattccgtcggtctggtggacctggatatttacggcccttccatgtccctgatgttcggcaccaaggaacgccccggagccaatgagaatgacgaatttatcccggtaacggcccatggcgtgaaacttctttccatggggctgctgattaatgaatccgatcctgtagcggtgcgcggtcctctggcgacacgctacgtccagcagttcctgcgcaacgtggcatggggggatgtggattttctgattctggacctgcctcccggcaccggagacattcagctgaccattgtccagacggccgaactggacggcgtggtggtggtgaccaccccgcaggaagtggcgctgattgacgcccgcaaggcgatcggcctctttgaacgggtggaaacccccattctgggcataattgaaaacatgagttatttccagtgcccctccgacggcaagatttaccatatctttggcgaaggaggcggcgaacgggaagcggccaaactgggagtgcccctgctcggcaagattccgctggatatttccacccgctccggcggggacgaaggccgccccgtggccctggaagatcccgggcaaaatccggtttccgccgcgttccgccaggtggctgaacaatgtgcccgcgtggtgcttgaccgctgaatgtcccggacggggcggaaggcccggtacggttggtaacccttaaatttgaagccggattggagcctgccgctccggtccggcttgtttgccggcatgttccggctcctttgaatgaggaatgcatggaaggaaataaaaaatgaataagacgtggaatttgaaggaaatgaaaaagttgataccgctggcccttccggtgctggtggtcaacctctccattgtgggcatgggggcggtggacgctattgtggccgggcgcgccggcgtgacggacatggccgccgtggccctggggtcttccgtgtacctgcccgtggctctcttcgcctgcggcgtgctgatgatcatcggccccgtgattgccaacatgcgggggaaaagccatgaaagccgcgtgggctacatgaccaaccacggcctgtggctggcgttgatgctcagcctggtttccatgccggtcatttatgtgttgagaaatgtattcggctggatttccgatgacgccgccatgtgccggatggcttccgcctacatgttcgccattatgtggggccttcccgccaacctgggattcgtggccctgaagagcctgaacgaaggctccaacatgacgcgtcccgccatgtacgtgggattgtgcggcctgctgctcaacattcccctgaactacatgttcgtcttcggcatgtacggttttccccgcatgggcggagcggggtgcggcgcggccacggcagtcattttctacattgaattcctgctaatgttcctgctggtttacttcaatcccaagcacaggccgtaccgcaggcaaatcatttcctggcggcggcctacgccttccgtcatcacgcacctggtgcgtctgggcgtgccgataggcgtttcccagctgtgcgaggtgatgctcttctgcgcggcggctctggtgctggctccgctgggagagacgcaggtggcgagccaccagattgccgggaacgtgggaggcctggtgttcatgctcccgctctccgtagggctggcggcttccatccgcgtggcgtaccatcacggcaggaatgacctggcaggcaccagatccgccattctgtcttcctatgtgctggtgctcaccatctgtctgtgcacctttggaggcatcaccctgttccgcgagcagattgtgcacctgtacaatgactcggagctgattgtcagcacggcttccgtcctgctggttctggcggcggcctaccagcttccggactgtttgcaggtgctttccgtcggggttctgagaggattccgggacacggcgtccattaccttcattacgtttttctcttattggatggtaggatttccggcgtgctacatcctcgcccgtacggactggattgtcccggccatgggagcgcgcggcatctggacgggattcatcatcggcctgtccgtagcggcggtgctgttgctctggcgcgtcgtccgtaccgttaaacgggagtttaagatgatgcggttccatgaacagtaagggacgctccctcctgtttttatggagaggttaattcccctctttttccgggattgccttctcagcaggaatgagtttcccttgttccaggcttcgcgggtaggggaagagttttttctcttcgccaaattttacggtcattcggccggaggattcgtccaactttactacaatgcccgtgccgtattcccggtgggtaaggaacgtccctttacgaatacgcacgttcggagcaggcggaggttcctcttcttcctcttccggacggcaggcgatgcggtcatccgccgttggggagggaagggctttttcctctacagcgccggccatggaatcctgctgggccccggccatcatttcatagtcttcccggctcaggacggtagcgtacagccccacgttttcctccgcgtggcgattgatacccgtataaacaagactggcgtcttcataccgtttgaacttgtacacggcatcattcatcagagcttcattaaagacgttcaggctgacgagcagttcaaaatctttttccgtcagcccggttactttccggaacagatgcggctccagttgggtgatcacatctttcaggcagtattcccggaagtctgacagatacatgaagatggggattctggcggcaaatttgatcagtttctgctgtatctgcctgcgcagggatttgatttccttttcttcctgtgagaggtcttttttttccttaggggtcagatcgtcttttcctttgcgcattcctttgacggcatctgatttgttgataatggtctcaagatcactgttcagattgcggaagccttcaatgctcatcagggcatccatggcttcccggctggcaagcaggcgctgcagggtgacgttatccacattgaccagcagggcgctttcccagcgtctggccagcagggtggcgctggttcccgccatggccatatccagtatttccgcagcttccacctgtttcatggcgctgccgtcgtaggccagcacgggaagaaagctgatgaactccttcaccttggtttccggattgcccgggttggcgttcaggcggcagctgtagtcagctatttgcttaagggcgcggtccagggcaaagtcaaagacgtagcagttgggtttgacgatttcttttttccccggctgatcactgtccaccgtccacgggctttgcacccggaaggctgcctggaagtaagtttccgggctggagagattgcgcagcatgaagatgccggcccagggcttgacggtaacgcccgtggtcaatttgccgcaggagagcgtaatggttttactttccagcggattgccgcccatggccttcaacacgggcggcagggcgttcgcccccgtgccggcttccggtccggcgcagacgatgacctgatagtcgtggtaaaaggtattctgacgttgttgcagcaggttgttcatggcgtggcaggaagccacatccggcagaaaccacagggtatggttgagcaaactcatcagccgggtatccgagtaaggcatggggggctttttgccgcccagcttcagctcatccgtcgccgcggcatgatgggagccgcggatcagatccagccatttctggacgtattcttcatgaataaaacgggctttattccctttcccttccgcctggaagaagacgttcaggtcaaattcgttgaactctccccccagagcgatttgccggatgtcctccggcacgcggtaggtaagcagcaccatgcgcggcagggcggcatacgggttattttccccctgccaggcagccttggcgcgctgttcatcggaatacgtccagctgtaaatttgttcttcaataaactcgccggagttcagggcgcggaacggcgttccggaaaggtacaggtagtggtccgcagtgatgggcagatcctgttcatcgcagacattgccggtgttggtttccgggggcgcggtgttgtattcttcttcctcatcctccatcaggaacagagctttggcgttttccttccacgccccaaagtggtattcgtcaaagataaccagatcccagttgatttcccgcacccattcatgctggggcttgatgccgcccgtttccttattcacccccagaaagtcctgaaaagagccgaagcacacaataggctgtccggcgtccgcctgccggtattgctcgtcaatgggctgggcgtccggcccttgttcccggcagatgaattgccagccttcaaagtccaggtgcgtttccaggtcttccttccacgccgtctgcaccgccggcttgaaggtcaggatgagcgcccggcgcgcgttcaaccgccgtgccagctggtaagcggcaaaggttttgccaaagcgcattttggcgttccacagaaaacgcggcgtgcgtccatccgcgcgttccgctttaaagtagttcagcgtccgctccacggcttccgcctgttccgggcgcatggtaaaatccctggtgcggttttccatgttggccgtccgggtgcgcaccgccagccatgccgccctgatttctttctccgtacagcggaaccattccccgcccactccctccacgccttttttctccagcatccggtgtacggcatggtccgtaaagctgcttccgtcttcatacagagccggttccgcgaagataacccggtagggtttcttcccttccggcctcaaggtagggtactgctgcgctacgcgtttttccacatccaccgccgtgtaccccactttcagacaaccgggatagctggcgtcctcataggcataaatcattggccgcgcattcgttctttgtttaaagaaacgatcgctgttttccatagttctttgtgtaaaaaactcaattgccacgtgggttaccctccaatctccataggtttaatcaatttctcaatatagtctatttcttcgctttttagagaatacttcgaatatagcatttcatctgtccaaggtttttcaaaaccgacataagggacaaaacagaatttatcttttgttatatgaatggacgaaagagcctgtaacagcaggaaacgagcaaatttactggacatgaaagaaacaaggttttctgcttcctgctttttctcaaacacatccaaaataaggtatgtttcagtacaggcttcttttgggttgagaatgcgtaatgaagataatatttgataattcccttcggatgtaggcttattaccaccagacatggcataggtgataatgactttatatttatcaaggatactttccttatctgtcacagtatttttgtgcagatagatgaaccctttggaggtaagaattttaatagtattaatcccgaattcattagaaccactaacagtagttggtagattgaaataattacgagagtaaacgactttgttcataagtttatctttacttgctagaacctttctaatgatcgttaatgcaaggttgctacgaacaaagtaatcaaactcatccaaggagcgaatattctctgaagtgcattctccctcctttatgttaacaacggcacagtctcccgaataagtgttatcccaaagaaaatagcagattcctcctgcaatatttacaccagggaagcagtctgcactattggtaacatctacaagttttcttatatgtttttgaccgagcatagttgctcggaagtcatccaaaccctttcctccagcataccatcttgcagggatgaccatagacaaatatttcggtttaagtttcatcgtttgctcaacaaataaatgatataatggcttggcacttgctccgttgcctccatcatcaagttgataagggggattgccgatgatgacatcaaagttcataggaaacaggttattcggattgttggcgtggatgaattcgtaagcgtggctttccagcccctcttttcgtgcctgctctccataggcggcttgagaggcaccgcaaaagacgcatttgccgcccctccaggtgtgtgtgatgtgtttgtagcggatgttgccgtcagcattgtcaaaacgaacgacggagtaaggcccattggggtatttggaacaatacactccgcggcgggcgagaagggatgtcagctccgtaatggcgatgccgaagagctgatttctgaaaatgtgttccaggcgctcctcccggtttgggaggtgagcttccagccccttgttgagccttttggcaatctccctcagaaagacgccgctcttgcagcaggggtccagaaaggtaacggaagggtcggaaaaaagctcctgcgggagcaaatccagcatggcgttggcaatctccggcggcgtgaacacctcgtcactggaaagattggccaggcagctcaatacgtcagggttatggatgttattgttcatgattccgcttccggcagtttgcggtaatccatgggggggaactcacgtaccgggtatttgggtacgtattccagaggaagttccccttccgcctgttccagggaagtccgggcgttttgatcacgcaggagttcatcttgccggaagtcccggcgtttgatgagggcgccgcccacggcggaccattcggaaaagaggataggctcctgagtatcatgggcggaagcatctacttttttcatgctcagggcgttgccgttaagaatgttgcgttccaggacaaagtggacggttttctggcattccgcggagggcggacgttttaaacgccgttcatattccgccagccacagggtctgcagacgttcccggcaggcgcggacgttatccgccagcagttccaccccatagatagacatgagagccagcacggcgcggaactcataatccgccggggaactgccgtattgccggcggacggttgccagcttcctcaacaggataggggccagaaaggcgccttctccgcatgccggttccagaaagcggctgtcaatgcgttccgcttcatgcgccaccagattgagcatgtcattcaccagccagtcaggggtgaatacttctccgtgatccattacccgtttacgggatttaatctgagaaggagtttgaggattgggcgacatgacgcctctcttttcgcacggataggctatccgcaagatttgtatagattgattttctttggagaaagagcaaaggcgcaagtatttgtgtacttagtcaatgaatgagtattgccgttacgtttttgtttccttatctttttttattgctctgaccgttttatacttgatgcggatagcctatccgttttcctatcttttcttcatgactcaacaggaattgatggaagaagaagccctgctcatttgctggatgcgtaaaaaacgcgtgcaggctgcggaaataatggtcatggcgcggttgctccggggtgtttcaaccgggatgtccgggcggctgcaatgcgtggagctggggattaaggaatggaaagcgatgaaaaagacggtcagtttttccgtttgcgtggcggagtccctgaaagcccgggcgcatcggcggcgacgcacgctggaagaaatccggtacgttacggcgcggatggtgaaggcgtggccggacctgagacataagatgatgcggagcctgaggcgggaagattgccagcgcatcctgaatatattcccgacggccagcggacggcgtaaggctcgcatcatcctacacggaatatgtgcttttgcctgccgcaggggatgggcggggaagaacccggcagcggagacgccgtgtccgcatgtgaaggaaagaagagtgcctgtgctgacgccggaggagtgccggaggctgatgacggcagcacaggaggtgtgcggtggcgagtgtctgccagcagctgcgctgatgctgtatgccggagtgcgtccgcaggaggtcagaagactccaattccggcatatcaggctggaagaaaaagcggcgctcattccggcacggcattccaagacgggaggggcgcggcgggtgacccttcggccggtagcgttgcagtatttgcgggctttccggaatcattccggggaagaaccattgtgcccggcaggatgggaacgcaagtggcggctggtgcgtgcccgcgccggctggaataactgccggccatgggtgcaggatatattaagacacacgtttgccagttaccacgcgctggaattccgggattatgccggattgcaatgggagatggggcaccaaaacgcccatttattgaaaaccagatatctgaatatggatgaaatcagaaggcaggatgcccgcgccttctggctggcggcgtaagcccttcttctcgggaaaacagagaggttgaataagaagcagggacgttcatgcaaagcgggcggtcccctccatgaagggaactgcccgcaaacggtttgagcagatgcttcggagattttagccgatgcgttccactttcacggagtgggactggccgttgatgatgatggtcaggtcacgggaaccggaggggccgctcacccgggcggtgatgccgttgtcaatgacggtcatggacggcgcagcggccgccggagccgcggcgggagcggtgttcacctgcacgggggcttcttccttaggttccggctttttgtagaagtcttccacctgctgcgggaacatggcgtagatgacgcagtgttcgtcgtccgtggggagccccttttccgcaagcttcctgcgcaggtcttccatgccgggcttgatcaggtccgccggacggcaggtgattggttccttgcccatcttttccgcgcagagtttctgcacttccgggtccacgggagccgaggtgcggccgtagtagcccagggcaatgtccgccgcctggggggtgatgttcttccaacggccgaacttgacgttcagcatcgcctgcacgcctacgatctgggaggtgggggtcaccagcggaatccagcccagggccttgcggactaccgggatttccgcgaatacttcctcaaatttgtcttccatgccctgttccttgagctgggtgcggaagttggaaagcatgccgccgggcacctggtaacggagcgtgtcggagtccaccacttcgttgcggtgggaggcgaatttgcccaggctttcataaacgggcttgagcatttcggacacctcaatgagcttgtccgcatcgtaatccggcttgcggggattgccgttcagcagggcgagcatgcgcaggcagtccggctggcccgtgccgttggcgaagggggagatggagacgtcgcacgcgtccaccccggcgtcaatggcgctgaggtaggtggaggcgccgaggcccgaggtgtcatgcgtgtggatccagacggggatattcaggtccttcttcagggcactaaccagttcatgggtcacataaggggggatgaggccggccatgtccttgatgacgatggcgtccgcccccatgtccgccagctctcggcccatgtccacgaagctctgcgtggtgtgcacgggggaagtggtgtagcagatggtgccgtgggcctgggctccggccttcttggcggcgcgaatggaggtctccatgttgcgcggatcgttcacgcagtcgaaaatgcggaaaatgttcatgccgtgcttggcgctcatggcgacgaaggcttccaccacgtcgtccgcgtagttggtgtagcccacgatgttctggccgcgcaggagcatcatgtgcggcgtcttgggggcggccttcttcagggcgtccaggcggtcaaagggccactccttcaaaaagcgcagtccggcgtcgatggtggcgccgccccaggtttccagggcgctgaagcccatggagtccagaatgggggcgatgggcagcatgtcttccgtcttcatgcgggtagctgccagggactggtgcccgtcgcgcaaaacggtacaattgaatgtaacaggattcattatttagttaactattgttaaaaattgaagaggtggcttcttgaggatgattttctcacagcctctctttcaggtcaagcgtacaacaacggattcaccgtaagaactactgcacgggagccatcagccgcgccaggttgcagagcatcttgaagcccagggatttgttgttgtaatcctccagggattcctttttggaggaggcaaaatccttctccagcatctccttcacctccgcgcagacggcgggggagtggatgacggcggtgatttcaaaattcagggccagggagcggttgtccaggttggcggtgcccacagtggcgatgtcgtcgtccatcaggatcaccttctggtgcaggaaccctttctgataggcccagacctggatgccgtacgtgtccaggtcacggaggaaggtgaaggaggacagcttcaccagaatgtggtccgcccgttccggacgcaggatgcgcacatccacgttccgcagggccgcggcctggagggcggccattaccccttcgtccgggacgaagtagggggtggctatccagagcctttcccgggctctgttcgccagggcaatgatcgcggttttccaggcggggatgacgtccgccgggccggaaggaagcatcagcacggtttcatcctcccgctggggcgtaatttcccagcacaggcagggcagggaggagggaccggatttcagcatggcccagttccagtcttccaggaagctgatttgcgtctgctggacggaggggccttccagctgcacaaacgtgtcccgccagtagcccagggctcccttgcccagatactcccgtccgatgttcatgccgccgatgaaggcagtggccccgtccacaaccaccagtttccggtggttgcggaagttcagccgcaggatgttgctcaggaagtggcgttttccgttgaaaggctcaatgttcacgccctccttccgcagggcggagatgtagccggggggaagcttgtgggagccgatttcatcatacagcatgtagatgcggatgccggccctggcgcgttcaatcagcaggtctttcaggttctgccccacggaatcgttcttaatgatgaagaattcgatcagaatatagtgctccgcgttcttgatggcgtcgtaaatgcgcgggaaggcgtggtccgcgtcaatgagcaggcggcaggaattgccgcggcagacgggcaggcgcacgatgttggaaagcgtgtgcatgatctttcccaccgtatcggaggactggacggcatacggggccatgcagttcgtgattttatccgtcagttccccccaggaggattccggatccgtctggcggcggcgcgtttccacatatccgctgaacctgcgccgccccagaatcaggtaaaaaggcaccgcaatgtacggaaaggccagcagggagatgagccacgcgatggttccctgcggcgtccgcgtgtggagcagggccggaatgaggcagaaggcgcctgctatgtggcagagggcggcaaatcccaaatatggctcttcagggatgatcatggaacggaaaccggaaaagatgctgagggggaaaacggcgggaagcggtgaaaaggctggcttttgaggctggagatggtactaaagtggcgcatgctcgtattatcacgggtccagggattagaaaagcgtaaattaagggaatgaaacagtatttggcacttttggaggatgtcctgaccaacggggtggggagggaagaccgtaccggaacgggcaccatcggcgtgttcgggcggcagagcaggtatgacctgcgcgacggttttccgtgcctgaccaccaagaagctccatctgcgctccattatttacgaactgctctggttcctgaaaggggagactaatgtcaagttcctgaaagacaacggcgttaccatctgggatgaatgggctgatgaaaacggggagcttggccccgtgtacggcgcgcagtggcgctgctggccggggaacgacggcaagcccattgaccagattgccaggctgattgacggccttaagaacaatccgtggtcccgccggcacatcgtcagcgcatggaacgtggccctggtggatgacatggcgctccctccgtgtcattccctgttccagttctgcgtgattcccgcccagccgggggaagggaagcacgggctttccctccagctttaccagcgcagcgcggacctgttcctgggagttcccttcaacatagcctcctacgctttgcttttgctcatggtggcgcaggtatgcgggtatgaggcgcgggaattcatccataccttcggagacctgcacctgtaccggaaccatctggaccaggcgagggaacagctctcccgcacgccgcgccctctgccggtcatgaagctcaacccggaggtgaaaaccattgacgggttccggtatgaagactttgaactcgtggggtacgatcccctgccgcacatcaaggcgcccgtttccgtttagaattccaccccttgatccatcatgtcacagcccgttacttatacaggagtagtcgccatggcctccggccgcggcatcggctaccggggagccttgccctggcgcctgccggacgacctcaagactttcaagcgcatcacgacgggacatcccgtgctgatgggccgcaagacttatgagagcatcgggaagccgctccccaacaggcagaacattgtgctcacccgtgaccccgcctggacggcggaaggggtgcaggtgatccattccgtggaggaactggaacgtctggaactgatggacccggaggtcatggtcatcggcggggcggaaatcttttccctgatgatgccgttcatgtcccgcatgtgggtctccaaagtgaagggggaatatccggcggatacgttcctccctccgtttgaggacaagcttggccatgcctccctgaaggaacggtttgaaggctttgacctgtacttgtacgagtaggggaagggacggcttcttttccgcattctccccggatatgggatgaagcgcaaaaaagacggagcggcaaagccgccccgtcttccaaatagggattttttctcccgttattgcgcctttccggtgaacagggccttcacccattcacggtagcgctggaacatggcgtacagcgccggaatgaacaggatgcccaccacggtggcaagaatcatgccgtagaaggtggagatgccgatggccttgcggcttgccgcgcccgcgccggaggcgatcaccatggggaacaccccgatgatgaaggaaatggccgtcatcatcacggcgcggaaacgctgccgggctccttccagagccgcctcctggataggcacgccgcgttcccgctccatcttggagaactccaccatcaggatggcgttcttcccggccaggcccaccagcatcaccagcccgagctgggcgtaaatgctcaggggagtgttgcagatgatcaggcccagcagggcgcccagcagggccacggagacggagacgatgacggaaatggggaccgtccagctctcatactgcgccaccaggaacaggtagccgaagagcagggccatgcccatcagcagcacgatcttgccgtcattctgccgttcctggtagctcatgtccgtccaggtgatggaataattttccggcagcggcagggcctcaatctggttcatcagctctccgctactgacgcctggcttggcctgggcggtcacttccgcggacatgagctggttgaagcgggatatctgccgcggtccgaccatgtaggacagagtggctacggagctgagcggcaccatctggccctggtcgttctggatgtaggtgttcatgatgtcgttgatgctggtgcggtcttccgccgcggactgcatcttcaccttgaacgtgtagccgatcaggttgaaatcattgatgtacatggaggccagcttgctctggagcgtcgtgaaaatgcggtttacgggcacgtgcatgctctgcgccttttcacggtcgatgttcaggaaaagctggggcgtgttcgcctcatacgcgctgcgggcgtacatggcccccggcagcttgttgatcttgtccagcagttcgttcgtcacgcgttccaggtccttgggagtttcctcgccactggcctggagcatgaaggagacgccgcccgtcaggcccaggcccatgatggcgggtgggctgaacacggtggccttggccgccggaatctcgtcgcacaggatggaagccttctgcatgatggaatccagggaaagctccggagtcttgcgcttgtcccaggagtcaagctgggcgatgcacatgcccaggttttccccgttgccgcccatgaagctgaacccggaggtggaggaaacctggcgcacgccgggaatgctcatgagcttctgctccgcgctgcgcatggcctgttccgtacggcccagcgtagcgcccggagccagctggatgtcgcagaagacggtgcccttgtcttccgggggaaggaaggacttgggaacggtttcaaacagcttccagttgccgagcagcacggcggccagcagaatcagcgtgagccaggcgcggcgcaccatgatgccggcgcacttgatatagctcttgcgcgcccattccagcgtggcgttgaaggggcggaaggggctgaacctgctctgcttccttttcttcttcttcagcagcagcacgcacagggcggggctgagcgtcaaggaattgatggcggaaaggcagagggccacgcacatggtcacggagaactgcatgtaaatgttccccaccatgccgccgaaaaaggcgatgggcacgtaaatggccaccgtcaccagcgtggtggcgatgatggcccccgtaatctggtgcatgctcttcttggtggcttcttccggggtcaggtcttccgtttccagaatgcgcatggtattctccaccacgatgatgccgtcgtccaccagggagccgatcaccagaatcaggccgaacatggtcagcacgttgatggaaaagcccagcggcagcaggatggcgaaggtgccaatcagggaaacgggaatggcgagcgccggaatgagggtggcgcgccagtcctgaaggaacacgtacgtgatgcccaccaccagaatcagggcgataatcagcgtttccacgatttccgccatggtggcggaaatatattgcgtggggtcgtaactgacgacatagcttacgccgtccggaaagcgttcctgcaatttgaccaacgtatccttcacgccgttcatggcttccagggcattggcgtcatccaggcggtacacggccatgttcacggaatcctccccgttgttgcggctgctgcccgtgtaggtctccgcgcccagctcaatgcgggcgatgtcgtccagccgggtgacgtggccgtcctgtccggtgcggacgataatcttgctgaactcctccaccgtttgaagccgcccggtgacgttcaccttgtactggatgaaattgttttccccttccgagccgatggaaccggcggcggcctgcacgttctgcgccttgatggcgttggaaacgtcatccggcgtgatgttcagggcggacatgcgcagggcgtccagccagatgcgcatgctgtaattcttttccggcatcaggttgacggcggagatgcccggcacgcgggcgatctcatccttcaccctggacttgacgaagttgttcagctccagggaactcatgctggtggaccggaaggcgaagaaccccaggatgtccgaggagcgcttccgtatcttgatgccctggtccgtcacttccttgggcagcttgtactccacgcgcttcaaggcgttctggacgttcaccatgttgatgtccgagtccgtgccgctcttgaacgtcagggaaagagaataaccgccggtgttgtccgacttggaggagaaataaagcaggttttccagcccgttgagttcctcctcaatgggggaggccagcgtctccatcaccacctgggcgctcgcgcccgtgtaagtggcctgcacgttgatgctggtgggcgcgatttccggatactccgcaatgggcagctgcttcaggcagatgccgcccgccagaatcatcaggatggcgatgacgatggcgaatttggggcgtttgataaacaggtccgcaatcatgggaggatcagttttgagcggaatacacgggattcaccttggcgccggggcgcactttgtgcatgccgtcgatgatgatgacttccccttccttcacgccggagctgaagcactgttcattattgaccgtgttgcccagcgtgacgtcgcggcgctccaccacgccctggtcgttcaccacgtaaacgtagctcttgtaggcgtcgtgcatcacggaggaaatattggccgccgggaagcggtccacgttcttcttggaaagattcaccgtgaccacgccgccgggcgtcagtacgtcttccggattggggaacctggcccagacgttcagggtgtccgtagtcggctggacggtattgtccgtcatgaaaatcttgcccggctggtcatacgccttgccgttggcgaggttgacggacacgagggcgtccttcttcatcttctcctgggtgccgaacagggaaagaaaatcgcgttcgctgatggggaacttcacgtacacctcgtcaatgcccgtgatggtcaccagggaaccggaggtgggcgtgatgtaattgcccgtggaaaaagtgacgcgtcccgtgcgtcccgtgatgggggccgtcagtttggtgtaattgaggtcatccttcgctaccgtgatggcggcgtctgcggactggatctccgcttccagggcgtgcatggtgctcttggcgttttccaccgtatccatggagacggacttggaggccagcagcctgttatagcgttcaaagctgttcttggcgtaaagcagcttggcttcaagctgggccttcttggccaccgcttcctccacggccgccttgtagcgcgtgtcttctatctcgaaaaggaggtctcccttcttcaccaccttgccttcccggaagcgggtggccacgatgttgccggaaacgcggggctgtacggttacccggtcaatggcttccacctggccgatgtatttcttgttcaccgcgctgtcgatggcggtcgctttctcgacgagtacggtactgggcttggcggcccctcccggcgctccctgggaataacccggaacaagcagagagaaaagcaggccggatccggccagcaggcggaggggaaccttccgttggtgcgtatgttttttcatatggtattatttactgtaaacgtggttgtaaagggtatccacaatgcggcagaaattctccttgtcctcctccgccagggtgctgaacagggtgtccagccgttgcttcatgccgttgtaaagcagctggaacctggactccccttcctcggaaaggcggatgcacagggaacgcctgtcgcgcgggttctccttgcggtcaaacaggcccttcttcaccatgctgtccaccagcagggacgtggagggaatgctcatgcggagatggtgggcgagcgtcttcaggggaatgccttcatggcggttggtcatcaaccggttcagggcgcccagggcattcatctgccggacggagagccccatgatcttctgatagtggctctggtccacttcattcaagttatctcttttaaactggtaaagaatggtctcgaacttgtgaacggaggtagtgatatccacggcaggttgaagcatggggctgttatgtcaaaaccggttaattgttgtcaaactaaaacaaataaagttgagaatttgttgccgtgtcgaaataaatcggaaaaatgaaaaatcacggctccttcaccatacaaaccgccggaggttgcggaagtttcaaaaaaagtctttttttcttgtcactggggtataaaggcgtgtataagcctccacgtcctcgccgcaaggcaggaacaacattcaaggtcatggagcggtagctcagttcggttagagcgccagcctgtcacgctggaggtcgcgggttcgagccccgtccgcttcgccaccttgtttcaaagaagaaacggccgcctccgggcggcttttttgtgccctgggattgtccggttctccggcacctgttcgtttgcctgttttttcccaagacgcatcccggcagggagtggagcctttgcataaatccccacggtttgaatgaaaggcatccaaccgggagcggaggctcttattcccccttctccttctctccgccaaacccctcctttccgcggagcaggggaccatgcttgatttcgccacaatcttcccccatgatacccgcatgattctggaactgcactccccgctggacatgcatcttcacctgagggacggcgacatgctgaaactggtcgcacccctgagctccgcctcctttgccggggcggtcatcatgcccaacctggtgccccctgtggcggatgcggatgcggtgcaggcctaccggcagcgggtgctggacgcttgcgggggagacgtcttccagccgtacatgacggcgttcttccgctcctattccgaaaaggaactggctacgctcaaggaactggtattcggcatcaagctgtacccggcgggagcaaccacgaacagcgaaggaggcgtaagggccatgaaggatgcggagggcaccatgtccctcatgcaggaaatgggcattccgctgctggttcacggtgaaagccacggattcgtgatggaccgggaagccgaattcctggacgtttaccgtgatctggccacccgcttcccccggctgaccatctgcatggaacacatcaccacggcctccgccgtgcggctgctggatgaatttgaaaacctcgcggctaccgtaaccctccagcaccttcttatcacgctggacgacgtggccgggggcatgctgcgcccccacctcttctgcaagccgatcgccaaaaggccggaagaccgggaagcgctgttgaaagctgccttatccggacatccgcgcctcatgttcggcagtgactccgccccccatcccgtccacgccaaggaagcgtgcggctgcgccgccggcgtgttcaccgctcccatcgccctgccgcgcctggcggccctgtttgacggacacggcgccctggaccggttgcagggcttcgtttccggccatgcctgttccctgtacggactgaagcctcctgccaggacggtgcgcctgcagcggcggaaaatgctggtgccggacgcctacgaggggcatggacagaaagtggtgccgatggaggccggaagcgtcattccctggagcttggtgtgacggccacccccgcgggaagatgacagaaagcaattgaaggaaaccgtctttatactggatattccggacgatctcactacaatccctgctcatggatcggattcgcgtttatacgggtggagtagcttcctgtaatggttatctcttcaagacgaaggataactcttacgtggcggtggacgctccgtccggcttcgcggactggatatactccaaaaagcccgatatcatcatcacggaccttctcatcacgcaccagcactttgaccacgtggaggacgcctgccgcatgcgccagatcttcggctgccgcattcacgccggacagccttacactgaagacttgacgctggaaaaaatggcgcgcgacgcctgggggcttcccctcaacgtacagccgtttgtggtggatgaaatactcacgccggacatccacacggcaaactggggcggcctgctgtggcatctgcaccaggtgccgggacactctccggacagcatcgtttacgacctgccggacgagagaatcatgttcacgggagacgttatctttgccggttccatcggacggacggaccttccgggagggaacctgcgcctgctgaaacagggcatagaaaagaaagtgctcaaccagcccgccacgaccatgattttcccgggacacggaccgtacaccaccgtgaagaatgaactgctgaccaatccgttcatctcctgaccacgcttcccgcgccgctgcgcggggacgtgctccactctttagcaagcatacaagatcaatgttattttcagaattaggtttatcggaacccgtcttgaaggcggtggaaaaatgcggttatgaacatcccacccccattcaggagcaggccattcccatcattctggagggccgggacctcattggggcctcccagacgggaacgggaaaaaccgccgcttttgccctccccctgctgacaaagcttcagcccatcggcaagccccagatactggtgctggaacccacccgcgaactggcggaccaggtggcggaagcctttgccgaatacggcgaattcaccgggctgaaagtggccctgctgtacggcggcgtgggctacgggaagcagacggaagacctgaaaaacggagcggacatcgtggtggcaacgcccggccgcctggtggaccacttctaccgcggcaccatgcgcttcggagaagtcaaggccctggtgctggatgaggtggaccgcatgctggacatgggctttctccccatcgtccgtaaaatcgtcaacctctgcccgtgggaaggcaggcagaccctcttcttctccgccaccatgcccccggtcatcgccggatttgccaaatggtgcctgacggacccggcggaagtcaccatcgcccggcgcgaagtggccgccaccatcagccatgccttttacccggtggcgctggaccagcgggacgaactgctgctggccttgctcaaggggacggacttccattccgtcatgatcttcacccgtacccgcaaggaggcggacgccgtgtgcggcatgctcaagcagcatggctaccgcggggaagtggccgtcatgcactccgacattccccagaaggaacgcatggaagcgctcaagggcttcaaaagcggcaaatatgatattctggtggctacggacgtggcggcgcgcggcattgacatcagcggcgtgacccacgtcatcaactaccgggtgccggaaaatgcggaagactacgtgcaccgcatcggccgtaccggccgtgccgaagcctccggagacgccttcacgatcatgacggcggatgaagtggactttgccacggctgtggaaaacttcatcggaaagcccattgaacgcaaaaagctggacggctttgactacacgtacaccgccctgctggaagacaagcccgttaaatccgtccgcaagtccaaacccgccggacccaagcgccgcagacgctaagggggagctgacaaggttctctctgcgggaatgaatatcatcccatgcgcatccttgccatagacccggccatccgcaacacgggctatgccgtggtggagggcgaccatcgccgggcgtgcgcgctggactacggaacgctctccattccccggagtgtgtcccagtccggctgcctgcttgccatcaagcagcacctgggcaacctcattgacaaatgggaaccggatgaaatggcggtggaacgcatcatctacgtccagtcccatcagacggccatcacgatgggcgcggccaaggcggccgtggtcattgccgcggcggaagccggactgcggatcatggaatactctcccaaaagcgtgaaactctccgttgtagggcggggggccgctcaaaaagcgcaggtcgccttcatggtgcgcgccctgctggaactccgggaaacgccggaatccgatgccgcggacgccctggcgatcggcctcacgcacctcttctccgcggaccccttgaaggcccacatgatggagaggaaatacatttaacagtgatgagagtttagagatgagagtttagtgtaaaaaatccggacttgcagtccgcgaatttaaaatctaatcactactctctaaactctcatcactaccttcaaggcttgaaggtccttcctttcccgtcctgccacgccttgagcagggaggcgtacatcttgttgagctgttccagagtggctacgcggaactcgacggtatttgtattcgggtaagccttggcgacggtggtatccggatcaatgcttcctcccgtcgcccggttgacggcgccggaaccgagttccttcgcccggtcggtcacattcttgatggcattgatgccggaattctgccccagcgtctccagataataaaacttggtgggcgtattccccatggtgaccaacgtcacttcatacaccatgcacgcgttgtccagaatatacttgtgctgcgccacagctacaatccggctgagatgcaccacatactgcccctccggaaaattgccgatccagaactggctctggttgtaatcatccgtagactgggtaggagcccccgttttggactgggcggaaaggggtacagctgtgaaaatacaaaccgctaaagtaaaaaagaagagatttttcatattcttatacaaacattcgcatttaggtgagatgaagagaaattattaaaaacacttattattaagtactgcaatcaaacaggagaaataaaattaatggtaagaatcctccactcctttttgataaccaagtgcataggcagcatgaggacttttatgccttactgcacctgcttggctttcaggtaacgaattcaaatctatatttaatttttctttacggcgtaatccatctttgtagcctctgtcataagcacatccagcgcaacggtgcctcccagctcctccttgatcgtctggtaaattgttaaattgaagatcgtaacgatgttcttttttacaagtcataaaattaatagtatctaaattattcttcaattaaaccaagtatccaatttgaccatgaaataatagtggatgctctgcgtttgtaagtttcatttgaactaatattatataaattagattttttcatgatttcgacaatttcgttttttgatggagtattccctttttttaaatataattttaatgattctttaaaaattttatgcgataatatgagctttacaaattcaagttgtctgtctgtaatagatttattaaacatgcccaagcctgtttcagtgagaacatattttatattattattatcatattttttatcgaccaaacctaaatattttgcagcattaaaataatattctgtttgtcgggcatcaaaatcataattctgcgtaatttcttccttgctaaggaataatttttgttttaataattcacacagattgattatgcgttcaaagctgtcagcttgaggaaagggaatcgatggttctgatacagtttttgtgttttctaaaatattttgtatagcttcaatattaatagatccttcttgaattgcatattttttatgcttaatcaaacgaatagagttataaaatttagcatctgtaaattcatattcacgaatatgaaaaataccatttgaatatgttaaaaatatcggacgtatttgtttattcaccttctctttccataaacggtaaggataatatagctgacggattaaaaagtcatcagaaatataatttttggcttctatcaatattaatgaatcatttccttcataacctccatctatttctatttgagaattatttacttttacttcaaattgtttttggtcttcggaagaattaattttgaaatcaaataaagaggaactcattcgtccgcttattgtcggaaacaaattgtcttcacctgtaaagtcatgcaatatttttgaaacaaaaatacaattaattgaagttgcttcgcttgttatatctttataatccatactttctagaaaagtaggaaaatcaatgaatgttatatctatttcttcttttttaaaagtacaaaaagtttcaaaagtactgatttcataagtgcctctggatgtaggtagaattgataagttattttcagagaataaatgggggagctgggaacgatgatcaaattttgtcatcaagcgtgcttctctgaactcattaatatctgtggaggatattgttacccgtcctttcgattttattgcatctaagatacggtgtttttcaaaaatttgttcccacgctatatcgtttttatatctattcataattgcgtattaaaacttcatctacttctccccgtttttccgcattcgcgttaattgaacggatcgccctgacagtgctaatgtgatattccttatactgttctttaatgaaattagacgaggaattagataataaaaattttatgcctctttttgtcaagtcgtcacaagcctcacgcaattttatttgatcaagaatattccatccaccctgaacgtaaccagtgaaattagaactatctgaaataggatgatagggaggatccagatatacaaatgagttcttttccaaatttttcaaaatatcattataatctctattataaatttttatattgttggaatttagatatagagaaactgctcttaaaactggttcgttgacgatatttggatttttatatttgccaaatggagaattaaattctccagaattgtttacacgatataatccattataacaagtcttatttaaatatatcagcctggaagctcgccgtacctctcctatttttttaaaatcagatgatcgatctagacttcgtatttcataaaaatatttggattcgtttttatgagtttttaaatctataataagttcatttaaattatttttaattacattatagacatttattaattcagagttgaagtcattaataattgcttttttaggttggagatgaaaaaatacagctcctcctccaataaatggttctacataagtatgattttttatatttttcggtatgaattctattatagaatttataagttgcctcttgccgccaacccactttacaaacggggtaactaatttgttttttatcattataaaatctatttttatattatttttatttttataggaaaaactatgatcctatttttattagttatttttctgccccgactagattttccttacagttttcttagtcgattgtcaatcataatttgaatgatttttatggatgtcttttgtataagggaaatttattataaatttatatttataattatattttttatttttaataaattattaagatattattatgccattttaaaaatttgttaaaaaataaaatgatttttattatttaatatgaaacattgatggtgatttctaggaagttgctttatagaaaaagatatgtagagatgatatcatctaacaaaaattgttgattttcaaatttttagaaagaaataatattagtgttttcgtagaaagaaattaatacgagagaaatggcttggtgggctggacgacaggaagatttattatggagaactttgaacgagttcatgccgaaacctaggaagaaaatgtatacaaagatatggtaccgtttcttaatgtcgcagttgaaaaaagatagtaactcttgatgaattatttggataaggatacggtaatgggtcgattgatatactaaattttaataataacgatacaaagagataaggattttggtatattcactaaaattgcaggctatggcgaaatgatgctaacatagagggggagagcctcactctgcgtgggaacatatgaaaaaaccgctttccccaagtgccgggaaaagcggtttcgttaaaaataacaatgaaaggtcagggttctatgatgttgaagtttccattgaacttgtccatgcatccgatcagctcctggaacttgtctgcattgccttcgatcttgatcatgcctttgtccagggcttccttcaagggcatggcctgcatggcaataagggtgaagttgagcttgtctccggtaattactgcatcaggatgatcgaccggttttccttctcggtacatcagtacttcgtcctcaacccagaagccgtatggttttccgttttggtctatccagttgaaagcgagctttttccctttggatttctcggcattgagactgatgcccatgtagtcaaacagcatttccggcgtgaggttggacagaatatccttggatacaagatccagagggttctgaagcaggccgtttctcagttcgtaggcaccgacgagaaattcattgcgccaggggccggattccgcctggtagccgagctgttcaagcgcgtccgccgccagatttcttgccttgctgttttgcggatcggcaaaaaccacgtgctttaatacttcggcggtccagcggtagtctcctttgtcaaaggctttttgggcgttgtctatcatcttgtcggcccctcctgccagttcaacatagcgcttggccgcttccacgggcggcagggcatacaggtttgccgggttgccgtcataccagcccatgtaccgttgataaatggctttggcgttgtggttcagcgtgccgtaataaccccggaagtaccattccttgtcgatttccggcggcagcttgatcatttccgcaatttctacaggcgtatatcccttgttaatcaggttcaacgtccggtcgtgcatgtatttgtagccgttgcgttccttggccaggaactggctgatgcgttctttcccccatctcggccagtggtgctgtgcgaataagacttccgttttgtctccataacgctggatggcttcatcaagagccttccaccagttgcttgcgtcccgaaccttggctcctctcagggtataaaggttatgcatggtgtgggtcgcgtcctccgcactgcaaagcgccttgaattgagggagatacatcagcatttcagaaggggcttctgttccaggggccatcatgaattccatctccactccgtctatcgttcttgtttcacccgttttggtgattgtatcggtaggcggaatgactgtaatggttccgctggagctggcggtgcccaggccggagcctacggtaccctccggccccttgttaaagggcgccgcatacatgtacgtggagcgcctccccatggcattgccggcatagacgttttcggaaacggcttctttcaggaatccctccggcgccagtatctgcgttttaccggatttgacgtcttgctccgatgttactcccttgactccgccaaagtggtcgacatgggagtgcgtgtatacaactgccttgaccggacgtttcccagtctccggctgttccacttcccgatagtagaggtcaagccccgcttttgcggtttcttccgagatgagggggtcaatgatgatgaggccttcctttccttcgatgatggtcatgttagaaagatcaaacccgcgaatctggtagatgccgtccatgaccttgaacagcccgcttttggcattgagctgggaaacgcgccataaactcgggttcaccgtatcaggggccggtttgtccttggtaaagtcaaaggcagagatgtcaaagaccgtcctcccctccttgtttttaatgttcgggtccttgagggttgccatgaatcccttttcagcatcctgaaagtcttgcttgtcgttctcgtccaggccatgagcaccgagaaatttttggttgtattcaatagtatggcttgtcgcctttttaggctgctctgcgccctgggcgcctatgcctccccctgcgaacattgccagcaacatggcagcgaaataattgatttttattttcatgatcagtttttattaacgggacgtgaaaagtaaaagagcggccagtcagccagttttcaccttgcaggaaaatagacttgccgttaaagaacaatgttcggaaaatggcagtatgttaatgtttgactaccagagttttctggatatttaacaggaaattccacaaccagggagggtgtcttttgtttttttatattacttatcctgctgatgggttgtgatttatatccggagttgtttggcggggagaataaagtgtctgtatccgagtcatttttacatgcctgtagcaaatttgtggaagaacatggctggaaatgcagggaatgttgtgctaggtaagaaggcatggaaagattgtatcgtcccaatgtggcggggctgttggtccgggaggacggaaagctgctggtttgcgaacgttccaggcagaaaggggcctggcagttccctcagggggggattgatccgggagaaactgccacggaggcagtgaagcgggaagtccgggaggaagtggggttcctgccgtcccagtatgatgttgtggaatcccggggcggctatcgttacgattatccgccggaggtgctggagtatgtccgcgaaaagcggcagcagccttttgtggggcaggagcaggagtatttcctgtgccggctgcgtgcggacgctccggagcccagcctggaccaccgggagttctgcgcctacaggtggatagccccggcccggttcaggctggagtggctgccggagttcaagaaggaggtgtacgccagggtgctggcggatttcttcaatgtccgggcacgggataagtgaagtggctcagcaggtcgtgcgcggcggagacggggtccatcttgtccccggccaccatgttttccagaacgggcatgcgggacgccacggcgggatgctgttcaaaggcggtgagcagggcttcatgcaccagggcctgaacccatgagagggactggttccggcggcggttgtaccagaagccggattccttcatgctgtcccggaagcggaagagcgtttcttcaatagtgtccagtccgcgcccttccagggaggaacaggtgaggacggagggcgtccagccgggggtggggctttgcaggtagtggagcaccattttcagttcctggcagtgggccgccgcccgctggcggttgtcgccgtcgtccttggtgactaccaggatgtccgccagctccatgatgccgcgcttgatgccctggaggtcgtctccggctccggtgatgagcaggagcatgaagatgtccaccatggaacggacggtggtttccgactggccgacgccgacggtttcaatgaggataatgtcaaagcccgcggcttcgcacgcgatcatggtttcacgcgtttttctggctacgccgcccagggagccgccggagggggaagggcggatgaaggcgttttcctccccggagagttcttccatgcgggttttgtcccccatgatggaaccgcgggaaacggaagaggacgggtcaatggccagcacggccaccttgaagccttttttgcacaggtaggtgccgaaggcttcaatgaaggaggatttgcccgcgccgggaacgcccgtgatgccgatgcggacggcattgcccgaatggggcaggagcttggagatgagcgcccgtgaggcttcctggtctttagcggcgttgctttctaccagggtgatggccctccccagcagggcgcggttcccggccaggactccctgggccagttcttctacggaggggcggtgcggacgtgcaaatttagtgctgctcatggatagagaatgcggattatttgaaagggggttcgttttccttggtgcgctccatatcgtagttgaaacgtttgaggacaaattggcgctgatcggccagcttgcgctggaagttttcccaggaacgcacgttcattggtgaccagcccgcttccgcaatggcgcaggcgcgggggtaggtgcggtaaagcaggtggttcagggtggggagctgttccgcccacatggtagcctgaacgccgatgatatggtctgtttcctgctccggcctgccgtaggcggggttcagcttgtagctttgctccagcgtagtggtgggcatccagccccggttgtcctggccgggaatctgggggtagtccagatagcagtgttccccggcggcgatgatgaggggaaggccctgctttttcgtttccgtgatggtggagggcgtcaagcccatgcgccaggtgaagacggtgtctcccttgcggtaaacgctggcctgggcccacggcttttcataccagaagatgggctttttgccgcgcgcggcgagcatggaggccattttcgcttcaaattccttcagttcctcgtggacgtccttcattcccttctgctggcggtatttgacgctgagagggcatttttcccaggttttttccagcggggcttcgtcgccgcccaggtgaaccatggtggacggaaagatgtccctgagctcgtcaaagacggcggcatagaatttccatatttccggcttgtgggggcataccaggtacaagcccacaccgccggtcgtgctgactttcgtgttgtggtctggaaagcagaagaattccggataggcggcggccaacgcctggttgtggcccggcatgtctatttccgggatgacctcaatgccgcgcgcggcgcagtacgccaccaggtctttcagttcctgcctggtgtacattccttcgtggggagtgccgttgccgaagctttccgcccgtttggaagagatgcttttcagtttgggatagcccggcacaggcaggcgccagccctggtcgtccgtcaggtggagctggagcttgttgaatttatagtaggccatcaggtccacgaatttcttcaggtccttgatggggatgaagtggcgcgcagggtccaccatcatgccgcgccacgggtagcgcggcttgtccttgatgactccgcagggaatgccttccggatgcgccgccagctggtcctggagctgctggagagtgaccagtccgtagatacggccctctttcccgccggaagagaggtgcactccctgcggggtgacggtgagctgataggcgtccttgcccagggcaggagaggttttgtcggaaagaagcttcaaggtcctggtggcgttccgcttcagctccgttttctccggctccggaataatactgtatttttctgctggtgcggcacacgccatggatgcagagaaggctgtgcaggccaggaggtagatcagtttaaacatgacggagggctttttcagaagagattctatcatggagaatcaggagtgataaggaaaaacggcggaattactttttgttttcccaccggaagggtggctcattgtccttcgtgcgtttcaagtcgtaattaaagcgcttgaggacaaaggggcggtggtcggccactttcctctggaagttttcccaggaacgcacctccatgggagaccatcccgcttccgccagggccatggcgcggggatagacgcggtaaagcaggtggttcaggtccggaaggtgttccgcccacacgggagcgtgcacgccccggatgtggcctgcttccgcggtggatttgccgaaggccggatccagttcataacatttctgcaaggtcgtggtttgcatccatccccagttgtattgtcccgggaattgagggaaatccagataacaatattcattggatgccataatcaggttcagcccggccttttttgttttctcaatggcttggcgcgcctggtcctgccgccacgcgtaaactgtttcgcccgggtggtagatgtcggcgttcccttcataccagaattgcggcgtttgcccgtttttgtcgagcagggctgtcattttggcgaagaaagccctcatttgttcctgttcgtctttcatgcctgccttggtccgggcttcccggcacagggggcattttttccagagttccgtgggggcttcgtcgccgcccaggtgaacggtattggacgggaagatgtccttgagttccttgaagacggcggcgtagaatttccagacctccggcttctggggacataccagttccttgctgttgccggccactgtccgtaccttcatgtccggtttggggaagcagaagaattcggggtaggcggcggccaacgcctggttgtggcccggcacgtctatctccgggatgacttcaatgccgcgcgccgcacagtaggccaccaggtctttcagctcctgtctggtgtacattccttcatggggaatgccgtctccgaagctttcctcccgcttggaggcgacgcttttcagtctgggatagcccggcacgggcaggcgccagccctggttgtccgtcaggtgcacatggagcttgttgaatttgtagtaggccatcaggtccacgaatttcttcaggtccttgatggggatgaagtggcgggcggggtccaccatcatgccgcgccacgggtagcgcggcttgtccgtgatgacgccgcaggggatgccctccggctgtgccgccagctggtcctggagctgctggagggtgaccaggccgtacatcctgccctccctgccgccggaggcaaggtggacgccctgcggggtgacggcgaggcggtaggcgtccttgcccagggcaggagaggttttgtcggagaggagcttcaaggtcctggtggcgttccgcttcagctccgttttctccggctccggaataatgctgtatttttctgctgcttcagtttgaaataccgggaacagcagcaatccggccaggagtggaaaaagccttgtcatgttttcagtataagccgtgccgggagagaatctttcaaaaatttgctccttcatgagcacgcggcggaatatgcttcatgcccgctgaaaggatatggtggaccctttgacaaaatgtttctcaggaattaccggggctggcatcccggcggtccggacacaagttcctttcagggaaagaggaagggccggaaagagggaaggccttttgtctttttcccatggtccgtctggcgctgttagcggctatttgaccgtttttccaggtccgggaatattcccttacggttgaggatggagaaaatgtgcatttgcgttcttactgtccgtgtcctcagatcaacagaaggattatttggaaaggtgccgtccacgctttgaagggctccgcagttgctggaaagttccggactttttcctggtccagaggaacgttaaaagtaaaaaagaccgcctccggagagacggcctttttcttaaaggtggtagccctatgaggactcgaaccccaaaatacggaaccagaatccgctgtgttaccgattacactatagggctatgtaacgggcacctttgcggtgcgggcgaattaaagcggaaccggttgttctttgcaagttttttttcactcaaatgtgtgttttgaatagaaaaaatgaatgcggagaaaaaagggcggtccagcttttctcccggggtcattcagccagggtttggaagtaggctttcacgtgttcccgggcaatttgctggtattccgcttctccgtgcctgccctgcgcctgctgccagggggaggccggcgctgtgttgatgcggccaagctgctgggccgtgtatttgccatagacgttccagatgtgttccagaaaagggatgatgtccgtttcctcttccagggggggctggcggcggctggggtgttcaatgatggagcagggcggctggtccttgtattcgtgatgaatggaggggagcaccggcccgcaggtccatgcttccgcccgttcgttgatcaggaaatcgccgtgatggtgcaggtgccaccagtccgccagaatgaccaggtggttcagtttgacgggcgtgagaggaaggttttttgcattcgcctgctgaatgaaccagttgcagagcttttgcgtggtagtatggtttgccatgctgaaatgggttgcccttcattataaaaggccggggatatttcacaatactaaacaggtttcattcttgcgcggtatggagaagagatgaggcggagtgccggaaaaggcgaactttcaggtaaatttatttgaagcaaggaaaaagaagaaataatttgtgtcatgcaaagcttggtattcgcgccagttcttgttgtggggggaatgtaaagtcgtttgttgaaaacaaatggtgttttcaaactctaacaaaatgaagaataattaaaattattgggaatgaaataaagttccagattcctggagcgtcctttaaaaaacattttgaatagcagtactttttatgatttgaattattttaacctaaagctcgttctgccatgaatttacattatttctatcattccggcttgttgggggcggcctgtctcctctctcccgtttatgggggattgatgtctgattccttcgacgttcagacttaccgtgattttgcggaaaaccggggcatctttggaatcaatgccaaagacgtcgccatttacgacaaggaaggcaattacgtgggctccatccccaaaatgatgaattttgacggattggcggacgcccatgccggggaagccgctttggtaggcggcccgggtttcatcgccaccgtgtcccatgattacaataaccagaccattacgtttaccaagcgttttggagccacggaaggaacgccgttttatgacgcctaccggagcgtggtaatcaagaatgcctggggcgaccagacgaattacacgtatgactaccgcgtgcagcggttgagcaagatcgtgacggaagcggaatacgccccctacctgacggatccggaatacctggacaacatgaagggacggctggttctgcgtgccgggtccggaacccaggctattgccacggggaacggtaaacaggacacggtcagcggaggttattcctatttgaccgggggaaccctggtttttgagggacaggccagcgttccgggaacaggagagccggaccctgagaatgccaagacctatccggcctaccgtttctggtacaatttcaagaaaccttcggaatccaatcccctgccttccggcatattggcaggggacagcggaagtcccagctatgtatttaatgagaagtccggcagatgggaatgggtgggggccggtcaatcccagggcggtagcggctacggcgagttcagccagatgcgctctggcaaccagtgggccagcgattacgtggacagtttcaaccgcaccgtcagcgtgtcggaagggggtggggatcttctgtggaatgtgacggatggcgacggaaacggaaccttcgttcagggagatatcagtacggattacaccgggctggcctccggcctgcgaggagatacctccacacagggaacgcgggcctcggacacgcagataggcgtgtgcagcaatcttatttttgacggctccggcggcaccattgttctccagggctcggtggatacgggggcgggttccctcacgttcaaccgggattacgtattgagcgacggaggaaatgcctcctaccgtctgaatacggcgggtttcgttgtgaacaagggggcaaccgtgacgacgctgctgaccggaacctccggggacgagtggcggaagatcggggaaggtgatttgatcgtcagcggccacgggaacaatgcggcggacatcaacgtgggaggaagcgggatgctgattctggaccgggacggctacgcggcgcacaacgtgaagctgaacggcggcggagtaatggtgcgcctggcgggggaaaaccaagtatccggggagttcatcttcggccaccgcgggggtgtggtggacatgtatgggcacaatttgacgctgaacgccatcactcacctggattccggagccgtttttgccaattaccttggcaattccaccgtaacgcttacgttcacgggctccggggaacagacgttcctgggggctttgcgggacggggaggccgcttcccgtggactgatgaatgtggtgtacgcacccggcacggcggaagggtccgtctggaatctggccggccatattctcaataccggaacgtggacggtgcagggaggagaggtgaaggtggccggagtgtataccctgcacgcgggcggctatgtggatgagaacgactggcagatggcctccttttccaccggaacagtgcaggtgaacagcggcgcccggtttaccactggcggccattccctggtagtttccgccgtgcaggtggatgacggtggcacgtatggcgtgctggccgggggagaccacagcggaaacgttgtgttgtccggtgccgcgtcgatgctgcgtgcggaagtggattccgggtccgcgacggagtccggcgtgatttccggagccggttccctcgtgaaaaccggggaaggaaccctgcttctgaaaaacgggaacaacagtttttccggaactgccacggttgaagaaggcctggtgcgcgcctcttccgccggggctctcgggcaggctgtctggtcgctggatgccgccggagccctggctgtggaaggcgctggtttttccgctattgccggaaagctggaccaggcgtcttccggaacgttcgtgctgctggaagaccaggcggcgatttccggcctgaacggcttcagaaacttgtccgtcggcgcattgggagaggtgaatttgggaacacggggaacgaccggcctgctttccggctggaccgcggatgggggctggtccctgggcggaggcggcggaacgctgacggtgaacttgaagctcagcggctccggcaccctgtctatcggcaacggttccaataccggaaccgtagtgcttgccaacgcgcacaatagtgattcggagggtggagctgctttctccggagttattgaactgaatgggggagtgaacctcacctacgcggacgtgcgctccctcggggtgcagaacaagaatgtgctcgtcaagtacggaacatcctttgcccttgggtcggaagcggatgccgccctggcgcatgtttccaatgcttccgaaggcgttctgctcctgtcgggaacccgtacggcggatttgaatctgggcggcatgggactgaattccgtgtgcatcggggctgacggacaggctgttttgtccggggccgtgacagccggaacgcagggatatttgttcggcggaaacgggatgctgaccgtagccagttcgcttggcggcaattattccctgacggtggatacccagggcatgggcactggcggaggagttattctggcggctgacaatacgtattccggtgaaacgcgcatcctctccggagcctccctgatggtagggaacggaggaacctccggcagcctgggaacgggagccgttgccaatgaaggaaccctggcattcaacaggacggacagcgtgacggcggcgaatgccatttccggtacgggcagcctgatccagaaagggagtggtgagctggcgctgacggggaacaattcctacagcggaaccaccaccattgcggcgggaacgctcaccatagggaatggcggtacaagcggttccctgggcgccggtgcagtcgtcaacaacggcgtgctcgccttcaacaggtctgattcggttgccctgaacacgaatgtgtccggaacaggctcgctcgtgaagaacggttccggcacgctcaccatccagaagatgctttcctataccggaggaaccaccgtgaataagggcgtccttgtggtgggctacggaggcgccaacggcatgattcgcgggaacctggccatccgggagggagcgcaggtgacattgaagggcggtgacagcttcggttattccggagggaacgcctccgtcaagaacgtgaacatcaatggaggaactctgtattttggagacaacaagaaccagacgttccagaatacggtgttcaacctgaccggaggcgttgtggacggcataacgggcggtcgcatggatatctggacgaatgccgtcgttaatgtgaaatccgcaaacagggcatctgaaatcaagcgcgtcaacgtgcagctcagggatgccaatcctacggtattcatggtggaccgtggaaccgcagacgtggatttgaaaatatccgcgaacatcgtgaactcttccggagttaaggggtccttcatcaagaaaggcgccgggatcatggtgctttccggaaagaatacctattccggtggcactacggtcaactgggggacgctggtggcggcctccagccaggctcttggaaccggagcggcctccgtcaattccggcgcgcgtttggcgctgggcggccttggcacggatatttctttcgttgccctagggaatgacatcctggtgaagaatggcggcattctgtccggttccgccaccctgtccgggaatacgacgctccagtccggctccgtctttgaactgaccttgtccatgggcggttccgccgggaatgaactggcgtacaacagcctgatgctccagtccggtgttttccagattgacgcgggagccaagctgaagctggcggcggtgtctctggattattcctccgacttctgggggacctcccatatcctgaacctgatagaaggcggcgcgaacgccagtttgaagggggcgtttacgctggacctgtccggagccggaaattatggctcctatgggtcctggtccctccagggcgatgaggattccaaaaccgtgaacatggtctggactcccaatgccgaggccgttttggaccattcggaaactgcggcgttgctcgcggctccgtctcctgcgccggttccggaaccttcctccgcgctgctggtgctggcaggcctggggacgtgtattttccgccgccgtgtgcggtgagcctgatgaagaaccccgccgcacttcccgaagccctgccggatgttcgtgaaaacggtctggactggaagatgggaagtgcggcagacttgcctgttccttgtttaatcataacttaatttcaatttcttatgaatgttcatcattattccgggctgctgggggcggcctgcctcctcactcccgcctatggcgggttgatgtctgactcgtttgatgttcagacctaccgtgatttcgcggaaaaccggggcatttttgatgtgaatgccaaagacgtcgccatctacgacaagaatggcaattacgtggggactatccccaaaatgatgaattttgacggcgtggcggatgcccatatcggggaggccgcgctggtgggcggtcccggcttcatcgccaccgtatcacatgattattataaccatttcgtttcctttacggttcgtttcggtgccaagcaaggaactcctttttacgattcctaccgtagcgttacgagaaaggatgcatggggtgataagtccgatttgacatacgactaccgtgtgcagcgattgagcaagatcgtgacggaggcggaatacgcaccttacctgactgacccggaatacctggacaacatgaaagggaggctggtcatgagagctggttccggagttcaggctgtcgccacaggaaacggcaaacaggaaaagattgatgcctcttatggctatttgaccggaggaacccttgtttttgaggggcaggccagcgctccgggaacaggagagccggacccggaaaatgccaagacctatccggcttaccggttctggtacaatttcaagaagccttcggagtccaatccattgccttccggtggattgtcaggggatagtggaagcccgtgctatgtgtacaatgagaattccggcaagtgggagtgggtaggtgcggcacagtctgccagtggaagcgggtatggacagtttacccagatgcgttccggcaaccagtgggccagcgattacgtggacagcttcaaccgtaccataagcgttgcggcgagcggtgacgtactgtggaacgtgacggatacggacggcaacgggacctttgtgcagggaggcgtgactacggattacaccggattggcggccggattacgcggggacacctccacgaaaggtacacaagctacaaatgagcagttgaacgcctgcaataatctgatttttgacggctccggcggcacaatcgtgctccaggggtccgtggataccggagcgggctccctcaccttcaaccgcgattacgtgctgagcgacgggggcgattcttcccgccgcctgaatacggcgggctttgtggtgaacaagggagctccggtcaccaccttgctgaccggagcctccggagacgagtggaggaagattggggaaggcgatttgatcgtcagcggccacgggaacaatgcggcggacatcaacgtgggtggcggcggaaatctgattctggacagggacggctacgcggcccgtaacgtgaagctgaacgggggcggagtaatggtgcgccttgccggggaaaaccaagtgtccggggagttcatcttcggccaccgcgggggcgtggtggacatgtacgggcataatttgacgctgaatgccatcacgcatctggattccggagcctgcttcggcaatttccgtgcgaataccgccgtgacattcacgtttacggggcacggggcgcaggactatcttggaggcttcatggacggaggggccttgaaggacggccagcttcatgtggtgtacgcgcccggcacgggagaaggttccgtctggaacctgtccgggcatattttcaataccgggacgtggacggtgcagggaggtgaggtgaaggtagccggggtgcatgccctgcacgcgggcggctatgtggatgagaacgactgggagacggccctctttgccaccggaacggtgaatgtggagagcggtgcgcggttcacggcgggaggccatgcggaagttggctcttccgtgaacgtggcggacggagggacatatgccattctttccggcggcagtcacagcgggaacgtggctctatccggttccggggccgtcatgagggcggaagtagactccggttccgcgacggaatccggcgttatttcaggaaccggctctcttgtgaaaaccggagaaggaacgctggtgctgaccggggccaattcctattccggcggtaccgtcattgatgcggggacgctcgccgtgggtgacggggaaaaagacggttccctgggtacgggaacgattgtcaacaatggaaccctcgctttcaattcgctccacgccagctccgttaatttgcaaatatccgggacgggccgcctcgtgaaaaacggttccggaatgctcgccgtgcagaaacaccaggcttataccggaggaactacggtcaatgaaggaacgctgatgcttatttcaggaggtgaggaaggtattatccgcggagggctggttatcaaccggggcgcaacggtttccctgcgcggggtggactgtttcggcaattcgggaaatgaggcctgcgtcagccatgtggaaattaacggaggaaccctgttccagaatgataccaggaaccagaccttccggaacatgaccgtcaccctggcaggagggacgctggacggcgtggcgaagggaagcatggaggtctggacggataccgttttccaggtaagggcggcggacagggcctcggaaatcaggacggttaatgtcaagctgaggggaagcagtcctgctgtctttgcggtggagcgcggcacggcggaggcggatttaaaagtatcagccaacatcgtcaattactccggagcaaagggctccgttgccaagacaggagaggggatcatggttttatccggaaagaatacctattccggcggaacgtccgtcaatgggggaacgctggcagcggcctccaaccaggctctcgggacggggatggcgacggtcaattccggcgcgcatctggcgctgggcggccttggcacggatatttcttccgttgccctagggaatgacatcctggtgaagaatggcggcattctgtccggttccgccaccctgtccgggaatacgacgctccagtccggctccgtctttgaactgaccttgtccatgggcggctccgccgggaatgaactggcgtacaatagcctgatgctccagtccggcgtcttccagattgacgcgggggccaagctgaagctggcggcgttgagcctcgactattccaccgacttctggggaacctcccacatcctgaacttcattgaggggggagcgaacgcgaccctgacgggtaatttcacgctggatgcgtcttccgccggagattacgcggcgtacggccagtggagcctccagaagaacgaggattccaaggaagtgagcatggtgtggacgccgaatgcggctccggaagcttcttcagccatggcatcggcgtttacggctacggcgcctgctcctgttcctgaaccgtcctcctgcatgctgctgatggctgccctgggagcggtgttcctgcgccgttccgttccggggaacgaataaaaaaggcctgtaaattcaacgcgccgcattccggagggagtgcggcgcgctgcttttccgcggttccgggaaggatacgggatgctttaaagaggaagaatgcgcgctctccgcgctacttcttccggagaaagggagtacaggctgtccagcagggagacggcaaaagagcccggagcgggactctgttcaaaggccatttcccccgcgatgcccatcaatacggccgtagagacggccgcttgcaagggggaggaggagacggcggcgcaggcggcggccagcgcgcccatggaacagcccacgcccgtgacgcgggacatcatggcatggccgttttccgtggcaatgacttggcggccgtccgtggaatagtccgtgcggcccgtgacgaggacagccgcccccgtatgcagggccagttccctggccgcctgcagggcgtctgcgctggagctggtgctttccggtcccttcgtgacggaggagtacccggccagagccatgatttcagaggcgttcccgcggatgatgcggggccgcctttccttcaactgctccgccagccgcgtgcgcagggaaagagctcccacggccaccgggtccagaacccaggggatgccaagccggttggcttcctgcaccgccgtctgcatgacggctccctgttcgcgcgtcacggtgcccaggttgaccagcagggcgcctgctccgccgcggagcatttccaccgcttcctccgcatcgttaagcatggcgggaacggctcctgcggccagcagcaggttggccgtcaagggctggacgacggagttggtcagggagagaaccagcggggccgcctcccggattttttccagatcggcggagacggcatggacgaggtcggttgatgaaggcatggcgtttgaaggaatactcagtgtccggttgtttccggagggaggacggtcaggccagcgcccgtgcggcggcttccgggtcttccgctccgcaaatggcggagacgacggcaatgccggccgccgctcccgtggcgcgcaccagccgggcgcgctccgagtccagcccgccgatggcgacgacgggcaggggggactgggatgccagagcggtaaagccctccacgcccagcacgggcggagcgttcagcttggagatggtgggaaagacaggccccatgcccaggtagtccaccagggcggcgtccacggcgcggagctggtccgcgttggagacggaaagccccagaatcctgtccgggccgatcatggccctgacggcaggaaccggcaggtcacgctggccgatgtggacgccgtccgcgtccagcgccagggccaggtcaatgcggttgttgacgatgaagggaacgccgcgggacgccaggaagtcccggatgggcagcgcttcccggtagcaggtgcccgcgtccggattggtggagcggtactgcacgatggtgacgccgccgtccaccgccctctggacggtttccagaaggctgtggcggcatttggccgcttcatcagtgaccaggtagagatggaggctgaattctttcatggctggaggatgggaaggattagtccgtgaacaggggggtggagaggtagcggtcccccgtgtccggcagcaggaccacgatggtcttgcctgcgttttccgggcgctgtgccacctgcgtggcggcccagagcgctgcgccggaggaaatgcccgtcagcacgccgtccgtgcgcgccagctccttgccggtggcgaaggcgtcttcattggtgacggtgatgacttcgtcatacacggaggtatccagcgtttccggcacgaaacccgcgccaatgccctgaatcttgtgggggccggcggtcccctgggtcagcacgggggaagcggacggctccacggccacgatccgtatttccggattgcgtgatttgaggtacttgcctacgcccgtaatcgtgcctccggtgccgatgcctgctacgaagatgtccaccttgccgtccgtgtcgttccagatttccggtccggtggtccggaaatggacttccgggttggccgggttgacgaactggccgggaatgaagctgttggggagtcctgcggccagttcctccgccttggcaatggctcccttcatgcccagcgcgccgtccgtcagcaccagttccgcgccgtaggccttcagcaggttgcggcgttccacgctcatcgtttcaggcatggtcaggatgatcctgtacccgcgggaggcggccaccgccgccaggccgatgcccgtgttcccgctggtgggttcaatgatgacggaatccggcttcagctctccggaggcttccgcggcgtcaatcatggcccgggcgatgcggtccttcacgctgccggcggggttgaggtattccagcttggccaggatggcggcgttcaggtcgtttttgcgttcgtaattggtcagctccagcaaaggagtgccgccgatcagttctgtaatgtttctgtaaattctcatggcttgtaggaaaagagcgttgtagccgttaaatcgttagagaatggcgcggaagccctgttccaggtcttcgagaatgtcgtcgatatgttccgtgcctatggaaagccgcaccgtggagggcgagatgcctgccgccttcagttcctcctccgtcatctgggagtgggtggtggaggccggatgaatcaccagggacttgacgtcggccacattcgcgagcagggaaaatagttccaggctttcgcagaacttgcgagctttttccgtgccacccttgatttcaaaggtgaagatggagccgccgccgttcggataatatttccggtaaagttcgtggtccggatggtccggcagggagggatggttcaccttctgcacctggggatgagccgccaggtaatccaccacgcgcagggcgttctgcacatggcgctccacccgcagggaaagggtttccagcccctggagcagcaggaaggaattgaacgggctgatggtggctcccgtatcccgcagcagggtggtccggatcttcatgatgtaggccagagggccgcagatttccgccagcacggcgccgtggcagttcgggttgggctggctgatgccggggaatttatcattctgcgtccagtcgaacttgccgccgtccacaatcacgccgcccatcgccgttccgtggccgccgatgaatttggtggcggaatgcaccaccacgtccgcgccgtgctccagagggcggaacagaaagggggaggcgaaggtattgtccacaatgagcggaattccgtgggcgtgcgccacctccgccagcgcgtctatgtccgcaacgttgcagttcgggttgtccaggctttccacgtacagggccttcgtattttcccggatggccttggcgaaattgtccggattgctgccgtccacgaaggtggtttcaatgccggattcggcaaatgtatgggcaaacaggttgtaagtgccgccgtacacgttggcggcggaaacgatgtggtccccggcgcgcgcaatattctggacggcataggcgatggccgccgctccggtggctaccgccagggcgcccgctcccccttccagggcggcgatgcgcttttcgaaaacgtctgccgtggggttcatcaggcggttgtagatgttgcccggctccgccagggcgaaacgggcggccgcctggtcggagtccttgaagacataggaagtggtggcgtaaatcggcacggcgcgggcatccgtggccgggtccggattttcctggcccacgtggatctggcgcgtttcaaaacgatggttcttattcatattttttatattcctatcgggaaagtagggaatagatagttaaagcgggacgggatgtcaagtgccgggtaaaaaaagtgggacataaggccaaaacaaaaaaggggcgaaaaaatgttcaggccgggtgctccggttaaatgcctgctccgtagtcgcagccgatttccttctgctgctcggacaggtcctccagcgtgacgcggcccaggtaatcctcaatgaccttttgcagcccccgccagaaaggcagcgtggcgcagcttgacgcccgcgggcacgggctgttctgggaggccgtgcaggaaaggggcagcagggagccttccgtcagtttcaggatgtcttccgtggtgtattcccggggatgccgggacaggcggtagccgccggacttcccccggaaactctgaacgaagcccgctttcagcaggatggcgataatttgttccagataccgtacggtgatgtcctgcctggctgaaatctccttcagggagatgtagccgtcgtcattgtgctgggcaagatcaatcatcaggcgcagtgcatagcgtcctctggtggaaaccttcatcataccggatcaataaacgatatttcaggctgcccgtcaatcgggaatgaaggcaccgcgcggaataagggaacacgggcggaccgcttctccggcagagggttcagtggatgtagtggcgcggcacccgggggcctattccggtaaaaatttcccaggaaatggtaccggccttttccgccagttccgtcacgggaatgttcggccccatgatctccacggtcatgcccggttccgggtgcggcacccggctgacgtccaccatgatctggtccatcgtcacgcgccccagtagcgggcaggagactccgtccaccatcacgcgggcgcccttgtgggccagggagcgcacgtagccgtccgcatagcctattcccacggtagccaccctggtgggatggtccgttacaaaggtgcctccgtaggaaatgccgtgcccctccggcagcgtgcgcgccaccgtcaggcgggagaaaagggccatggccggcttcaactgcgcggcccagggagagggaatgggggaaaagccgtacagcaccagcccggggcggcacatgttgttggagggaatctcataatccagggaagcggcgctgttggccagatggcagtacttcaggggcagtttttcccggatgcgggcggccatctgttcaaagcgggcaatttgccggagggtgatttcccggtcctcgtccgcgcagggcaggtgcgcgcccagcccttccatgtacaggctgtccagttcccccaggcgggagagcaattcttcaagctggtccggcaggaatccgccgcggcccatgcccgtatccacggagatatggatgggaagcgtcttcccgtacagccgcgccagggaattgtagtgcacggcttcctcgatggtggagatgaaggaccgccagccgttcagcacgatttcctcccgttcctccggaaaggcgggacccaggatatagggccgggtgcggcatcccgcctggctgatgcgccgcgcttcccccacgttggcgactccgaagaaggcgatgccttccgaatccagggtgcggcagacctgttccagcccgtgaccgtaggctgccgcctttaccacgggcatgtaatattcacccttggccgcctgcttgacgacgttcaggttatggcggatggccccgaggtcgatttcggcccaggcgcggggggggctggtaactggcatgatggagaaaggcggagaggttggaaaaaggaaaggggcggcacgctgccccggtacggagggattgtccgcctttgcccgtgcaatgccagacggatttttgtcagtcttggtgcaaaaagaagggaggacggcagggggggcagagacgcatccggcattcgggtcattccggcttttgcggtaaagtgccggggccggaggcaggtgtttcctgctctggatgggaagatgcgtgcggggcgtcccgcagggttttcagcagggccgccatggtgtctatgtcctcgtccgtcatggaggagaggccgtccagcttcttcttgatggcttcaatttcctcctccctgtacggcatgggttctcccgcatggggatgcaggaaaaaggaggtgatggtgctggtcagcgttcccacgaagccgatgcccgtgagcatcaggaaaacggccaggaattttccgggagtggtgaccgggtaggtgtccccgtagcccactgtagtggcggtgacaaaggaccaccagatgccgttgggaaggctcatgccttccgccagatggatgcccacggcccccagcaggatgatgaccagggcggcaatgcagatgtacttgaatccgttcgtgttgaagaaacgcctgatgcgcgtggtgaacctcatggcgtaggagaacaggtccaggtacctggcgagccgcagaatctcgccgagggaggcgaacctgaacagacggaacagcacgtcaaagggaatgatggccagcaggtcccagacatggtccttgacgaagagccatttggacctgctgatggagaagcggaccacgtaatccagcacgaaaatccagtaaatgacccggtctgccgtcacttcccattccgccgcctcggaagtcaggtcaatggccgccagcgtcacggcgaccagggccagcaggcacatgcccgtttgataggccagcttcaggaacaggaagtgccggggcatgtggtggaacgcgttcatgacggggaatgaaaggaaaaagccgtccccggggcagggagcggcttgtgaaagaggccgtttccgccggaggctttatttaagcaggagctgctccatcagggcctgggaggactgggccagcacggcgggatcgtccagcatgccggcgcggagcagggcggtgttcgcgatctggtccgccaccatctgggccagttccggattttccgtcctcagcgcggagagcttcttcaccagcgggttggaggggttcagctccagctggggatggctttcggggatttcctgccccatggctttcatgtacgccctcatttccgggcccatgtcattgccgctttgcagggccacggcggctccgctgaccaggcgcttgcccagggtgaccttggagaatttgtccgggtacagttctttcagccattcttccagggcggtggcttcctcctggggcagggcgtccttctgttcctcttccagctcgggaagctccacgtcggcgcggtcgatcatcgtgacgggcttgccgtccacgctggacagggagtccagcacgaactcgtccccgtggtccgtgaagaaggcgacttcgtatccgcgggccttgaaggcttccaggtacgggctgttttccaggtgggagcgggaggggccggtgagcgcgtaaatggcagtctgcccttccttcatgcgggtgatgtattcctcgaaagaggtcgtttcccccgcatccgtggcggtggactcaaaacggagcagcttgcccagggattccttgttcggccaggaggtgaccaccccttccttcaggtagcgggaaaactgtccgtagaattccttataggtttctttttcgtccctggcaagtttgtccaggtgcttgatgaagcgcttggtgataatgtcgctgatcttgcgcaccagggaattgtcctggagcatttcgcgggaaatgttcaggggcaggtcctcgctgtccaccacgccgttcaggaagcgcagccattccggaagcaggccttccggcttggcgtcaatcagcacgcgcttgcagtacagggagacgttggcgtccacgcggccgaagccgaacatttccggattacgcttggggatgaaaagcagggcattcagcatgatgggggcgtccgcgctgaaatgcatgtaggacaggggcttttcatccgtgtgggagataaactggtaaaactcgtcgtattcctccggcttcacgtctgatttggacttggaccagatggcctggacggtgttgatgtgctctccgttgaagttgatggggaagcccacgaagttggaataacggcgcaggagctccttcacgcggtattcctgggaaaactcctcatactcatccttcaggtggatgacgatgcgggtgccgcggtccagcggttcgtcaagggtttcaatgctgtagccctcccgtccgttggaagtccagcgcagggaggccgcctccggctcccaggaatgggtaaagacctccacctggtccgccaccatgaaggagctgtaaaagcccacgccgaactggccgatcaggtccgcgccgccttcctgcttctgcttgagggcctccatgaacttcttggtgccggaatgggcgatggtccccaggttttccaccaggtccgcttccgtcatccctatgccggtgtccgcgatggtgatggtcttgttctccttgtccgtggtgatgctgatttccagaggcttttccggctggtagatgttggaatccgtcagttgtttcaagcgcagcttctccagggcgtcggaagcgttggaaacgagctcccgcacaaagatttcccggtcgctgtaaagggcgttgatgacaatgtccagcagctgccggacttccgcctggaattgatgcgtttctgtattcatatggaaaaatgtgttacgggtgccattatagggacctcgtcaaggggatggacagtttttaagcggtggcaggaacgccccatgtcacaaaaacggcctttttccgtccatgttcccactggaggatttttccttgaaacaattcaggaaactgatcagtatagttttataaacatgatcctcttaccattcttgaaaaagggagcccttttgctcgctctctgcggcatgctgggcggcggcgtgctttccgcccaggagaccgggtccgttccgattacggaagcgggcctgaaggcgctggattccaacgtcttcaccaatgacttcatgctggcgctgaaacccagtgtcacgcgtgaccgcatcgccaaaatcaaggatcccttcgtgcgcgggctcgcccgccagatggcggagaaaaaatatgaccgcaaggcgcgcgccatcacggcggaaccgtacgaaccggtcaaggacctggcggaccgcctgcgcaccagccagtacagcaagtttgaaaaccccaccggcatcttttttgaggaaggggaggacgtgctgctggtcatggaagaccccaaaggggaaaaactgaacctggtcatccacaacttcgggcgtgacggaggccgcagctcctaccctctcaaggcgggaatcaacatcatcaaggcgaaaaacaaggggctgggctacattgaatacttcacgcccaactacaagaaagctcccaaggtacggctctccatcccgtccggcaaggtgaacggcgtgttcgtgggaggcgtgagcaagaacagcgactggaagaagatgctggaaaattcccccacggaggtggtggacatcgttggcagccgcgtgcacctggtgtatccggtggaggaactcaagaaattctgcccggacaagggggaggaactgatcgccctgtatgacaagatcatcggcatggagcagcagatcatgggcctgtacaagtacaagatgctgcctaaaaaccggatgttcggccgcgtgatctggaatggcttcatgcacgcggacggcacgggcgccgccttccacaacggcacgatgggggaagtgggcaatccggacaagattcccggcagcgcctggggcatcgcccatgaattcggccatgtcaaccaggtgcgccccgccatgaaatgggtatccaccggggaagtgaccaacaacatttactccgcctacgtgaattacatgctgaatccctccagcatgcgcctggagcatgaacgcatcaacggcggggacggcaacatgatcggcggccgctttaacgcctacctgaacaacggcatcctgaagggggaaaactggctcatccaggctggcccggacaagcgttccggcggggacaaccgcccgatggtgcacgaccactttgtcaagctggctcccctgtggcagttggagctgtatttcaaggtggccgggaagggcaatcccgacttctatccggacatcttctacaaggccatcaagatggacaccaaggggaagaaggacggcgagcttcagctcgcgttcatgaagaacgcctgcgacgtctccaaacaggacctgacggactttttccagaagaccggcatgctcaagcccattgaccaggagctggacgactacacctgcgcccgcatgaccatcacggagtccgattgcaaaaacctgattgcgtacgccagaaagtacaagaagccggaaagccccgtcatttactacctttccgtcaacagcgtggaggcgtacaagaaccgcctgcccgtccggggcgcctgcaaccagggcatcacggaacagggcaaccggcgcatcatctcccatgacgtgtggaaaaacgccgccgtctttgaaacctacaaggataaggaaatggtccgcatcaccatggtggggacggattccaaggacaactcctccaccacggttccctatccggagggctccacccggattgaagccgtttcctgggatggcaagcgtacgctggcgtacggcaagcgtcccgccaaataaaagcttaagaggttagcgtgttcgggcgccgccgttctccggaacggcggcgctttttcatgggagtgttctcgctccatgacggccctccggccacaggaaagcggccaggtgaataatcgccccatacgtcttctccggtgtatttttatggccgcgtcccgggaacaagggctcccgccccttgcaaaaccatgaacggcaaacgcagaaatttccctttgccgcgcttgggataagttcaggtacgaaaaccggaatgctttcgctcttatcaggcctgctgcatgcccaggacaccgtggctgatttcttcatcgtgaagctccatcttgcccccggaacctgcgtggccttttccgcctgtacttccttccggttttccagtaagaggtgaagaagcaagcatggccgccatcgtcaacgacctcagtgaatatttgaaaaccagtccttatattgactggaagcatgagctggtgctggacagggccgcccggctccgcgccgcaggtaaaggagagctggaatggatagcaggcgcctaccgcttcgtgagggatgaaataagccattcatgggatgcgcaggataaaagagtgacggtttcggcgtcagacgtgctgcgggagaaaacgggcatctgctgggctaaggcgaatctgcttgcggccctgctcagagcctgcggcatcccggcggggatatgctaccagcggctgacgctggaagatacgccgggaagcgggtactgcatccatgccctgaatgcggtttttctgcaagatccgggcaggtggatcagacttgacgccaggggcaataaagagggcatccgggcggagatggatttggagaaggaacggctcgcgttccgcgtgaggccggaaataggggaagcggattattctgaaatttacgcggaacccttgcagctcaccatggacgtgctggaaaacagcacggacgccctgtacatgtacctccattccctgccgggagaaatttagcggaacaggcggctgttccgtgctcccgctctgaatgcaggaggaacggttcccggggcgccgcaggcctctgcggtttctgaacggaatgcggccagggactgcgcccttttttattattccttcgctgacgcttgattttctttcaattgacgcaagaggttaagccgctccagacggctgcatatggaacattaacgcataaaaaagcctctgccgttcggcagaggcggtgacggaaagaatcagttcttgcagcaggattccccgctccttgggcaaccgaggcgcgccttcaggatgcgcttgaaatccgtgcccagcaggatgaagcctccggccatcatggcgatatccttgatgacgaggcgtcccgccccggacagataggggaagccgtggttgggtccgcccaggtcgggcacccacgtttccggggtggttatcaggaaggacaaggttccggcggtcatgatgatgagcaggcagtcgccgatgaggcccaccttcgggaaaaagaggcccagcagtacgagcgtgccgatggagacgatcaggattcccagcccgtaggcaaagccgtaggtgttgttttccttgtgccatgcgatattggccggcaccacggctccctccttattcatgtgctgcttgtattcgggagccttcttgtcgtagaagaaactcatcatcgggctgttggctacgaagggaacaatgccgtccgcttcatactggaaggccttgaggccgccaatccaggcaaagacgatgaagacggccactctcagaaaattgatgccgaaccgttggacggtctcggcgtatcggaggcatttttcaggggacgggcatgtagtaggcatatccgcttgtaatactgaaaatattcatcgtcaagggaatttagtttaattccaaatattcctataggaatataaaatgcagacaagccgtaagacattcttttttaatatgatggtgtttttttagatgtgagtggaaaaactggaaaaggagagatataaatggctgcctttccagagcttggcttgctgcgctcccaggatggattcccgaaggccgggaggccttcattcccaggcggcctgtttcgttcaagctgcgggaacatgtcttcctctgcctttcctgatggctgcggtgccggggtcaaaagggtgatttgttccacgttcggcttccctcattctgcggggttcatgcttcgcattccgtccagccgcgcaaaccgtttcccgggccccctgccgcgtacagccggaaaagttttttacttttgaacgggggcgggggaacggctgtataacatgggatggataaggcaggaacttccggaagcatgaagggaaagatgctgctgcttgtggcctttttgatcatttgtttcaatctgcggaccggatttgactctccggacccgctgttgggaacgattgaaaaggatatgggcctttcccttgaaaattcagggctgtttgccctgctgcccgtgtttgtgctgggcgtggccgcgcccatttctccgcgcgtggcgcgctggctgacgccgtggaagatcattttctggttccagcttctggccgtggccggtattttctggcgcagctgggacggcgtggcgggcctgtacggcggcatggtcctgatggggctgggcatggggattgccggagcggctattcccggactgatcaagcaccagtttccggaccacgcctccgccatgatgggcatttacagcgccatgatcggcgtggggagcgcggtggcctccggcctgtccgttcccatctccaacatgctgggcggctggcgctttgggctgggaatatggattattcccatcctgctgggaatgctggtgtggggcgcgtacttcctcaagcatccggtaggagtgttccagcgcgatccggattcttccggccgcaacctgctgcgcagcagcaaggcatggcaggtcaccatcttttatttgagccgggtgggggcagcctatttcttttacacctggattcccatcttcctgaggcagcgcggcatgagctacgtggacgcaggtttcatcctttccgtagccatgtttgcccagcttcccgccacgctctccgcgcacgctctggaaaaagccacggggggccggggccttctcatcgtgatggccatggccctggcggctctttcctgctggggcatcctgtatcttccgctggactgggctgtctggatggccattctgttcggcctggcgacgggaaccgttttcagccgcggaatggcgctgatggtggaacgggccagaaccccgtcggaggcgatcaggctttccggcatgtcccagggcatcggcttcaccatgggcgccgccctgagcctgctgttcacctccttcctccaccagggcggttccttcctgccgttctgcctggtttatacctttttctgcgtgctcggcatgatttccggccgcatgtccgcccagccggggtatgtgtgatatgttcagggagatgttagatgttaagaattagcggttagatggagggaaacggtggttttccccttcttctttccgcttcctgccttttgttttttggagaagggccgccgtccgaagggcttgacgctggcgggggggaggggtaagctcttgcccgtcaaattttatgaaggaagagattgtacgcattcaacgggacgccctggcgcgcatcgcccaggtgtctgacaggcgcggcgtggaagacgcgcgcgtagccatcctcggcaagaaaggggaactgaccatggcccagacgggcatgaaggacgttcccagggaggaaaagcccgccgtcggccagttgcttaacgaggcccgcaaggccattacggaagctctggacgccaagctggaggaagtgcaggccctggcggacaaggccgccgtggccggcgttgacctgacgcttccggcccgctccctgcagccgggcggcctgcatcccctcacgatcgtgcgggatgaagccatccgcattctgcgccacatgggctttgccctggcggacggcccggagattgaggacgagttccactgctttgacgcgctgaatacgccggaggaccatccggcccgcaatgagaaggatacgttttactttgattccggcaagctgctgcgtacgcacacctccaccgtgcaaatccgttccatggagaagcagacgccccccgtgcgcgtgatttcccccggctccgcctaccgccgtgacgagattgacgccacgcacctttccgccttcaaccagctggaaggcctgtatgtggatacggacgtttccgtaggcgacctgaaagggacgctggaatattttctgcgcgccctcttcggctccgatacggaagtgcgcttccgcccccatttcttcccgttcacggaacccagctttgaaattgacgtgaagctgaaggtggacggccaggaaccgcgctgggtggagatcgccggctgcggcatggtggacccgaatgtttttgaagccgtggaccgcgaactggggctggaacccggcgtgcaggcccgctatacggggctgaccggatttgcctttggcatcggcctggaccgcctggccatgatccgctggggcatccgggacatccgcgccctgattgagaacgacatgcgcttccttgcccaattccaataatttttaccttacccagatatgaaaatttcccttaactggctttcccagtatattgacctggccggcctgagcgtggatgaaatgtcggacatgctgacctttgccggcattgaagtggaagacatccgccagcagggcgtggactccccgtacgtggtggtggcccgcgtggcctccgcggaacagcatccccaggcggaccgcctgaaggtctgccaggtggacgtgggagacggcacgctgcaccagatcgtgtgcggcgcgcagaactacaaggtgggggacaaggttccctgcgccctgccgggagcggtgctgcccggcaactttgaaatcaaggtgggcaagctgcgcggcgtggaatcccgcggcatgctctgctccgcttccgaactggggctgcccgacaaggagcacggcctctggattcttccgcaggagctggaaatcggcacgccgatctcccaggtcgtcaaggcggatacgatggtggaagtggaagtgacgcccaaccgtccggacctgctttcccacaacggcatggcgtatgaactggccgccatctccggccgggagtacaggcccgtttccattgatgacgccggggtggagctggaacccgccggggacttcgtgcggctggaccagccggacctgaatccgtactacaccgccgtgaaaatcagcggcgtgaaggtgcaggaaagcccggaatggctgaaggaacgcctggtcgccatcggtctgcgccccatcaacaacatcgtggacgtcaccaactacgtcctgcatgaactgggcacgcccctccacgcgtttgacgcggcgaaggtgcagggcggcatcgtcacccgcaccgcctacgaaggggaaaccttcaaggccctggacgggcaggaatacaccctcaactgcacggacctggtcgttgcggaccagtccggcaaggcgctcgccatcggcggcgtgatgggcggggaggaaagcggcgtgacggacgccactacggacgtcattctggaatccgcctggttcaagccctcctccgtgcgcgccacgtcccgcaggctgaccctgtcttccgactcctcctaccgctttgagcgcggcacatccgcctggaacgtcctgcgcggttccgtgcgggccgtggaactgattcttcaactggcgggcggcacggcctcccaaacgtatgtagccggggctcccgttcccaatccggcccatgcctgcatgccttcctgcggggagccggacggccccgtttccgcgttcgcttccctgaagcaggggaagggcgccgcagtgaccaatgaactgggtttcgtgaagcttccctgggaggctctggaccagatgtccggcggttccatttcccatgaggaaggagcgcgcatcctggcggcgctgggcctgacgcaggttccggacgccccggaatgctggctgatccccccccaccgcctggaccttacgcgcccgtgcgacctgctggaggaaatcgtgcgcgtcttcgggctggacggcattccgtcccgcttctccggccccttcgtcgcggaatccccggtagacgtggcccacaatttccagatgggcctgcgccgcaagctggcggccctggggttctatgaaacccagaccatcaagctcatcgcctctgaagccgctgacggcacgattgcccaggtgaaggacgcgctgcccctgcgccccctccaggacggtgacctcatccgcgtgtccctgccgctcagcgaggaccactccgtgctgcgccccgcgcacacacccggcctgattgccgccgccgtgcgcaacagcaaccagggcgtctccggcctgcgcttctttgaacttggccgcgttttccgcaatacgggcggcggcaagggccgggacattgaaacggataccctgggcatcctggtttccggggaccgcacggcgcgctcctgggcggaccccaggccggaacaggcctcctttgaagacctgctggccgtgatggaagcgctggctccgggccaccgctttacgctgactcccgccaaaccgcgcgaacaggccgccctgggggcggacgtgcagcttgacgggaaggcctgcggctacttcgcccgcctgtccctggcgcgctgccgggagctgggtctggaccagcccgtttacgtggcggaactggacctgcgcaagatgcaggaagtcctcaccgcgcccgtgaaggccgcggaattgccccagttccccggctcctcccgtgacgcggccatggaactgcccctctccacgcccaatgcggacatcgtgaaggccattgaagccgcacgggaaaaactgctcgccggctactcctgctttgacgtattcacggacccctccggtgaaaagctcccggcggaccgcaaatccattgcctacaccttcctgtacagggacccggccaagaccctcacggctgcggaagtggacgccgcgcaccagcgcgtgctgaaagtcctggcagacaaggtaaagggcctttccttcagataaccccccaacaggccgcgcgtttcatgaaccggaacgcgcggcctcctttttatcttccatgcacctgcctaccctgcgccatgcgggcctgatagctgcccgtgtcctgatgtttgcggcgtggttcggcctgtccgtgtgggcggccggggtagtgttttacaatgtatggggcggcgccgttctggtatggctttacgtagccgccatggcctgcgcttttgttttccgcaggaagcggcccgtattctggcgcgcctcctggggtgtgctggccctgctgcttgtgtattacctgtgcattccggcgacgaacggcaagaaatggcagccgtcatggagccgcctgcccgccgtggaaatcaacggaaatgaaatcctggtgaaggacgtgcgcagcttcgtttaccggacggagcaggactttgacgtgcgctacgtgacgcgccgctttgacctggacaagctggccacgctggactttgccgtgagccactgggacggcatggaatttgtggcccataccatgctctccttcggctttgaggatgggaagcatctggccctgtccgtagagacgcgcctgccggaaggggtggagcaggggaccatcccgggcctctacaagcagttcaacgtgatttacattctggcggacgaggaagacctgttcggcttgcgcaccacctaccggaaggaggacatgtacctataccgcatcaacatagacagggagaacctgaaaaaggccttcctggggtttgcggagaaaatcaacagcctccatgaacgcccgcgttactacaacaccgtcactgccaactgcacgacggaactggtggatacgttcaagaattacctgggcgtgcgccgctggcaatggactcccgtttttaacggcatgtgcgaccaggacgcctatgaccggggagagctgctccatctgcccggagaaaacttccgtgaactgaaaaaacgctccttcctggggcatggcggggaagggctggactgggcagccctccgccgccgctgggaggagggctggcgcacggaataagccgcaccggttaaagggtggcgaactggaagtgcatccagtcgtaatcccgtgcgcgccccagggatacggccccctccgcctccacgaactgccagaaggccgcgtactccggtccggacagtaccgctttcggtgcagggatgttcaggccgttcctgtctgggtccatgtccacggcgatgccccaggcatgcatggacgtggccttgccgccgatgatggagcggttgttgaagcagccgccgtacaggtccagccccagttcccgcaccttctccatgccgtaatggtccagggtggcctggaaaatgcgggtgagcggttccgccaccagcttgtggcagcgcatggtggaaacggtcgtgtccctgtcccacgcaagtctcatgatgtagggcagcctgacgctggtcaggttgctttcatcccccgcccggccgaagatggattttccggagcgcacctcctcctggctgggccaggaatgttccggctggcggatgtccagtttttccatcagggcctgcgccgtccgggggccggggatgccgtccgcatccagtcccagatgctgttgaatcaatttccagtgttctttcataggagttcacgctaggggtttcctcccgtaagttccacatttttcctgccagcggcattcctgcctttccggaaggggagaaaaagaagcggggtgtcttttatgttgcggaaaggactcattctgctacacttttattcaccttttattttatgaattcagaaccatccaacgttgtcaaattttacaatggggaacaaattcccctggaactgcataaagtccgcgtggtgcagaagctgcatcttgtccccgtggaacgccgtctggaagccgcgcaggaagccgggttcaacacgttccagttgagcacgaacgacgtttatctggacatgctgacggattccggcgtcaacgccatgagcgacaaccagatcgccgccatgttccgtgcggacgacgcctatgccggttcccagagctttgaccgcctgaagcaggccgtatgggacgtcttcggcaaggaatacctgcttcccgcccaccagggccgcgcctgtgaaaacatcatcgcccgcaccttcgtgaagcccggggacgtggttcccatgaactaccatttcaccaccacgcacgcccacattgacctgaacggcggcaagattgaggaactggtggcggatgacgccgtcaacccggtcagcaccaaccccttcaagggcaacctggaccccgccaagctgcgcggctgcatcgcccgccatggggcggacaaaattcccttcgtgcgcatggaagcctccaccaatttaatcggcggccagcctttctccattgccaacatgcgtgaaatccgcggcatttgcgacgaattcggcatcatgctggtgctggacgcctccctgatcggggaaaacgcctacttcatcaagatgcgtgaagacgagttcaaggactcctcctgcgctgacatcctgaaaaccatgtgcggcctggcggacctggtatacttctccgcccgcaaggtttcctcctcccgcggcggcggcatctgcacgaacgaccgctccatcgccaagaaaatggagcacctggttcccctgtttgaaggcttcctgacctacggcggcatctccgtgcgtgaaattgaagccatggccgtgggcctgtatgaaaccacggacctgaccgtgatttcccagagcccctccttcattgaatacttcatcggccagatggtggacatgggcattccctgcgtgacccccgcgggcggcctgggcgcccatattgacgccgggcgcttcctgccccatattccgcaggaggactatcctgccggggccctggcggcggccttcttcatcgcctccggcgtgcgcgggatggaacgcggcacgctctccagcgtccgcgacgaaaacggcgacgacattctggcggatgtggaactgctccgcctggccttcccgcgccgcgtcttcacgctgtcccaggtcaaatacgtggcggaccgcatgaaatggctctacgacaaccgcgacctgatcggcggcctggaattcgtggaggaaccgcccgtgctgcgcttcttcatgggcaagctccgcgccaagagcgactggcctgaaaaactggccgcgaagtaccgccaggacttcggggaaagcctgtaaaaaaatctcacgatctactggaataaaaaacaaggccggatccacgcgtccggccttgtttttctaaagaaaaataatttaaaaaatattttccgttttttgataaaagaagtgttagcgcaagtcgtttttacggaatcccttgtagatgaagtctgtctttgggccgcggcccaccgtcctgtcaaacagatctaccatttccccgtcccggtaccctgccatgcggatgaatttaagaatatccgctttgctgttggaaaaatgctttataagaattgtcatccagagtttttccatgcgttccagattagattttgcacttaactggcggttttgggcagtgacatacatgtcactgtaacgtctgcgtgcttcaaactgtcctcggatatattctttcccgaatatctcgtcttccgttgggaatgtatcgctgaatccgttattggctacggaacggaactgcttaatataagctgaagcataggatgcagtaagaagatttatctccctttctcgaatatcaagttttgatgcgatctttgaatgatctaggaaaagcatagaatcaaatacccaatgctttagtagaatatcgtttttggaaccgatgaaaggagaaatattttccttagaaggatggctcaggtcttgataaccaataggagctgctcccaaatagtagaagagccataattgatatgaaatcatttctttactggcggaagtctcatttatacaaccgatttttctgtataatttctcagccgtattatagaaactcttcatatcgccctggctgagtaatttttcaaattctttgaattcttcagggcgcggaggaagattttttaaggatgacggtggcttcaggaatggatcaagcttgacaggattgagcttggcaggctctggattaacgggaacaggatgaacggtcttgatcttgacgagattggcgtttatcggttcggtcatacccagagcaagcaaaatgaaaaaaatacttttcatgatcagttatttaaattattcggaataggggttgttttttgtaccttaaccggatttttctcagagtggaatttatcaatttctattgtaatatccttatttgttttggaaatactgcaattcataataccacgtgcgacgcccgcacataactctggatcattaccgtttgattgtgccgacactaacctgaaccagcatttgtgtccccatgtcatcgggttttccttatccagaatgtttaattgatctttggtgatcggcaaatcaagagctatttcgtccttaaactggttagtctgctgaatttccacgggcttgggattggggttatgtggtggacgattgtttttattatgctggggattgacatatccttcgtctatttccttgattttcatttttgagaaatttacgtcaagaggatgaatggttaattggataatcatccaggctgaagcaaagggaactcccggcatttgttcctgaatttgaggaggagtatcctggccttccttgagtttttgtacctttgctccctcagggatgacaatcttaagagaatatggtttggatactaatcccccttctgtttttactgtaaccgtaacctgtccgtttttttctgctgttggtttagcttgagcatcaaaagatgtgattcctttcattttttcaggaagaatcaatacaccttcttcatccgtgacgatccattccagttttttagggtctcccatcaaggctggtttcgcttccaaactaatggtgattgtttctcctactccaatggtttggcgttttaggtcatcttctttggaatccttgctgattcccatattgaattttgcggaatgaagttccgtcttcgatacaattttaagaccttctatttcttcgttttcagcatcttctgccccagctgtcgaccatagaacaaatagaatgagaatcttgcagacatattgtatagtaattcgattactattggtgtaacatattggacgagaaaacatagtcattatgagaaggcaaaggctaagaaaaaatgatgcattgatcaatataaaatttcatcaatagtgaatgtataacatttgccccggcgaaggaatcaccctttttctgtaataacagaggcgatttttattgtttttgacaataaaaagtcaggataggatttaaaattgaagcaggccctgcttccagcatatccagacggccgccgccgcgatgagaaggatgatgacgaaggcggtgcctgcggaagatttctttctggccttgggcagggctttccgcgccactcctccggcttgcagggttcctgcggccgccatggcgttgatgtaatcgttccatgctttggcggaatggaagcggctgcgttcatccggagacagggccttgtcaatcccggaaaggaagttcatggggtatgtcttccgcagggccgcgtaactggtcaccttcgggttgcggtccaccacggaacgctggtccgccgggtggggaacctggcccgtaagcaattcgtagaacgtggcgcccagctcgtacatgtcgcaccaggggccgatttcgctccggcgtccggggtagaattccggcggcgtgtagccgggagtgatctggacgaggccctggtgctggagggtcttggtgcgcacggcgccgaagtcgatcagcttgggcgtgccgtccggctggatgaagatgtttcccggcttgatgtcgcaatggtaaactcccatggcgtgaaggtagtgcaggatgtccagcaggcggaacagaaggtccgtggcccgtgccggctccatgctctgtccggtggcgtgcatggtggtcatcaggtcgaacagggtctgcccctggatgttttccataacgtaatagcaggtgccgttggcatcaaacatgtcgaacacctgcacgatgccggggtggttgagctgggccaggacggaagcctcctgccgggagttggaaatgctctgggcgaagttgacggcggcctgttcgtcccgcgggtggacgaagccggtttccatgtcccggaaggcgtaggcgtccggcatgcattccttgatgacgacgtaccgggaatggggattgtccagcgccaggtacgtaatgccgaagcctccggcgttcagcacattcaatatcgtatacttgtcttgcagaacggtattgttcgcaagcgggtaaaccagggtttcttgttccatgtcaggggggagggcgggttggggccgggaaaatctttaattcaatacgcaagttctgtcaagaatctctctgccgtattcaataacaggaaacccggaattcgtattcctccacgctgccgcgttccaggcaggcggccagccagtcgaacagggcgccgaattccccgcccagggtttccccggtatcggcctccagcgccttcaggcggctggaagccaggcgcacgggcgtcagctccgccagcagggcggcgcattcctcgtcccctgccttgaaaatctcttccgcccccggcagttcgcacaggcgttcgtctgcaatttccaggcacacgacgcctacgccgaagtcggcggccagtccgcgcagggcggcgcattcggaatcatccggaagttcccccacgatgaccagttccccgcactgcgcccagcgggacgtggccagggtcctgaaaaactccctcctgccgtcttctcctccgggcatgcgggccacgcagacgctgcggatgcccatcatgggcgctccgatcatgcggcggcgctggagcgcgctttggtcgaagaccagcgcgttcccctcccattccccatccggccattccacgacggccaggtccggcttcacccatgaggttcccgtttcactggtgctgaacacgaaaaccccgcggcccgtggtatcatactggcgcacggccagggccagcgccttggcgcggcagttcagcgcgtccggttcgttttcccccagaaacaggggcagcagccccctggccgccggtttgccgtcccggtcccgaacgcgcctgtaatagccctggccgcgctccaccttggcgatttccgagtccggctcggaggccatgaaggagaaatggtagcgcagggaggcgtctgaatactcctcacccagcctcaggcgcaccaggcggatgagttcggtccccttgatggcctgggccgggtcggaaggcaaaagttccggaagcaattcttccaactgggatcgtagactcatacgcgccccatgagaacacgggagggaagcttcttcaaggcggaaggagttcagcacatgaaataaaaagctcttttatttgttccggaatacggcaagatggtccgcatggcatggattacctccggttatataccttcgcccaggcgcatggccgtaatcgccggtaccaccttcacgcagctcgtgcggatgaaggtgtttctctttctgggcctctttgccgtggctctgctggccctgagctccttccgcctgagcgcggtgctggggccggaaaccgggggaatcaatgaactcgttctgctgaaaaactccgcttacggcgccatgcgggtgttcggcctctttttctgcgtggcggccacggctctgattatccccaaggacgcggaagaccgcatcctgtacaccatcctgtgcaagccggttcctcgcatcgactacctgatggggaaggtgctgggggtgctggccctcaccctgatcgccgtgctgctgatggacgccgtgatgacgctggtgctgtggctgcggacggatacggtggtggcggagcagatcgcctccctgaaaggccgctatacggtggaggaaatgcagccgtacctggacagaatccgcctccagggcgctacctggaacgtgcagacgggcctgggcgtcatgatgtgcgaattcgtggtcctctcctccctcacgctgctgatgtcctgcatgacgaacggaaccatcatcagcgcgctgctgacgttcatggtctatctggcggggctgttccagacgcaggcgctctccctgtgggtgggctccggaacgggaggcatctcctggtgggaaatggcgggcagcaggctgtttgccctcatctttccgaatttccagatttattccgtaacggattccgccctgaacgggcagaccattcccctttccctgttcggcagtctggccctgattacgctggggtacttcgtctttcacatgacgctggccgcatggctgttcaggaaaaaggaattttaacctggaaaagtatggaagacatcatcaatgcacgttgcggttgggccggaacagacgaactatatataaaataccatgacgaagaatggggcaaacccgttaccgacgacaaaaccttgtttgaatttctggtgcttgaaagcgcccaggcaggcttagcctggattactatcctccggaaacgcgaaggataccgggaagccttccatggctttgatgtggagaaagtagcgcaaatgacgccggaagacatcgaccggttgatgcaatttgatggaatcgtcaaaaaccgtttgaaaatcaatagcacagtcaataacgcgaaactgtttatggttgttcagaaagaattcggcagtttctaccagtatgccctttcattcttccccggccgtcagcctgttgttaacaatttcaagaccctaagccaaatccccgccacatctcccgaatctgacgccatgagcaaagacatgaaaaagagaggcttcaaattcttcggttcaacgatgtgctacgcttttttccaggcggccggctttgtgaacgaccatgtggaaggctgcttctgcaaagtaaatcaggcggaatagactggagcgtaaccgtttacaatttttacgaataatttgccactgaaagctggaggaaacaggtgcaaaagtttatctttcactttcacaggttgtaattaatatctttattttctataaaccgtttatatttttgaccgcaagaaaatcatcaaccatgaaaacaggtatcattggactgggaaaaatgggcggcgccctcctgcgcggcatgctgaaagccggagcggtgtccccggaggaagtctgggtgtacgaccaccaccatgaaaacgtgcaggcccttcagcaggaataccccggcgtgcatgaagcggccacggaggcggatgcggcggacgctgtggaggccctgattctggccgttaagccgcacggcgtactttccctcatttcctccctttccgaacggggggaggagctgccgctgttgatctccatcgctgccgccatctccctggatgacatggaagcctgcgccagcgacggaacgcgcatcgtgcgcgccatgcccaataccccgtgcatggtgctggccggggtcatcgcctacagcacgggagccgccgtgacggatgaagatgaggaggcggcccggcggctgctctccggctgcggctccgtctacaaggtggaggaagccaggatgaacgctgtttccgccatttccggcagcgggcccgcctacatgtttacggtgctggacgctctttcggacgccggcgtagccatgggactgcccaggaaaaccgccctggaaatggccgtggaaaccatgcggggctccgccctcatgctggaacagaccgggaagcatcccatggcgctccgggatgaggtgacttcccccggaggcaccacgattgccgccctgaacgcgttggacgaatgcggattccgcaatgcctggattcaggcggtgaaaagcgccgtgcggcgggcggaggaaatggaggagcattgacgcatgcgctcttaaacgctcccgggaaccggattggctaaaacgcgtgcggcgcgcctttacctgttccggaacggcgtttccctctgcttccggagctccgggctttgcaggttgaactggactttccggatggatttcagcgggattctgacttttcccagcgctgcggaacgcccttccatgaagccgttcctgagggtctccaggttcagtgaaaggatgctctggtccgtcaggaaaacgcgggtgtccgcgccgtcctccggcagtttcttctcctcctggcttttctggtccaaggcgcgcaccttggcggtggggatggtcacgtcatagtggtccgacttgatgcggatggagccgttttcctggagggaaatggctccccggagcacgtctccgttcaccagcagggccttgtccctggaggcgtccgtgtcgtacttggaaatgatgtcctgttcctccgccaggtaggggagggcgccgttccagtcaaacacgttcaggttgaacacggccatgttcaagccgtcgtaaccgctcacggcaagagtattgcccggtttgaattcatgctttttggaggcttccccgtcttcttcctcatcgtccccgctttcattctcaaagatattgtccatgtccttgacctcctcccaccggccaacctgttctccgttgacgtataggtagtaattgcctttttccgggtcggcgtaaaaatgaacgtcggaacgcttgacgctcttgtcggcataccagttccgctccgtgttccttttgaccctccccagcgtccggtactggccagaactattcttggagagctccgccttttccagggagaggcccaggtcaatgctgcttccggagttggagtcctgccagagggagagattgatccggaacgtattggtatggtaaagggaaaactgtacatggaggcgggacggcatggggaaggaggtttgcagttccgtattgttggagccgcgcatgatccagtacccgttgcggcattccgggagcatgctgttggcggaggacttccagccctggagggattccgtcgcgttgcgcaggtaggctttctgggagtcgaacccgatgtgccgcacgtacttcctgttgacgggaagcaggccgccccacgcggtttgcagttgaaggctctccgtatccagcgccttcagggtgccgtaaaactcgtccccgttggcgagcctgatgacggaaaactgctccggtatctccagcggacgggaagaaaccagctcgtccagctcctctaggttgacatccacgggtttggaaagaatgctggagcggactttcaggtacgggctgtccagcgtgtccaggctgcccggcagtttttccccggatttaagcgtaatgaccccttccgcccgtgagccgggcggaaggacggcggccagcagggcgcaggcgcccaggaaaagcgttattgcttgtttcatggcggatatatcagggggtggagcgggatggctgtgcggaattcagaaactccacgcgggtgatgtttttcaggggcagggaaatctgcccgagctgcggatgccgcaggatgattctcagggaatccatgctcaggatgttgccgtgcaggcgggagccgtccttcatcagaatgctgtggcatgccgcagagcgggaatcgtccttcttgttctgctccgcgaaaaagacggtatccagatacttggcggggatggaaagctcccggggaatgcccggatattccttgtccgtggaaagagtcagcgtcttattcctgctgttgtagctgctgatggaaccgggaatggcgtcctcctccttcgtcaggacaaggtccgttgcggcatttccattcttggtcacggatttggcgctcagggtaatggaggaaagggccagcctgctgatggtcagggagacgtgcccttccatctggaggccgaaggcgtccccctgcaacggttgttccggggggctggggtccgtcatcagcttgggcggcaggtctcccaccagcagctcgtaaacctgctcgttctctccctgccgggaggccgtcagcctgatatccacgccttccgtcagggtaggggtggggatgtccacttcccccagcacgatgatgccggacttctgttcccggagaaggatgcatttgccgggagcgatgctgagcatgagcctgttcaggctgctgccggaattggaccggaagggaatgttctcgttccctccgaagcagaagacaatgccggcgcgatcgttgttgccgtccatcgtcatggtggtgcggaaggtgaaggaggaaggatccaggccgatgttcttgtacaggggaatccaggtggggtagtcgctgttgcccagccggtactggtacttgtctccctggattttcggtttcagggcgttcatcagttttcttccggactgggtgcggtaatcgtcctcccggttgccggaataaacccagctgttgtcgaaaatcaggggttcctgccagaagcccttttcctggagcgtatccagccggaagccggccacctggtcgcgggggatggaacgctcgttgcccagcatgtcccggtactgcaccttgtcctgcgtgatggagatgatgttgcacgggatgatgtcccgatgtcccgtagccatgaaaatcttgtccctggctcgcaggtccggggaggaggtgcctgtgaaataaagcgcgcggatttccgacgggaggatgaccgcgttctggcgcatggccgggtgcttgatgacgatgccctgtttgccgtaggagacgatttccccgcggaggcggtaattgctgtccgtgaccacgtccacaacggaattggcccaggcggtcagcaggcaggccggagccagcagaagggaaaggcggattctattgttcatagatgggtaaaaatctgtaattgagcgccagggaaagcagggccgcggaggtggaatacgctgcggaatggtctgagagccaggaaccgttgggtgcctgggaggcgcccaggtagcgcatgttcttgtaattccattccttccatacctcctggtccgcatggaacagggcctgggacatgtaatactcaaaatagaaagggtaggaggaatcccggtaattcaggttctttttcaggtaggccagggaatccttgaaggacgggtccgtcttaaggcgtgccagggacagcgtcagggagccgatggcggtgagggtgacgcgggggcccgccgggccggtatagccgtaggcgcccttcttgtcacggcaggaagccatatacttgaggccgcgttcaaaggcctcgtccggcacgggaatgcccgcgttgcgcgccgcgaacagggagacgatctggcagccggtcaccgtgctgtccgcatccgtggactccggggaatagcgccagcctcccgtcttgttcttcttctgggcggtcagcgtcagggccacggccttccggagggcggggcctatgcggtcgtccctcaccatgccgtaggcctccgccagcgccagcgtggcgaaaccgtggttgtacatggaatccccaatgtagccggatcccctgttctgcttggaaaggatgtaattcacgcagcggcgcaccatggtggcgtacggccccgtgttcgggtcgtccccgtgggccagcacggacatgaggcagaagccgatgatgccgggctcctgcccgtaggtgccatcataggtgccgtccgtcttctgggcgttctggaggtaacggagtcccttcacgtacatcagctctacctggggcggcacgggggaagacgttctcatggaggattgggcagcggcgttctgcggcgcggccgccatgcagcagagaagaacggtaaggaggatgagggcctttttcatgggggaaagggagttattgttcattcacgggcgggagccgcccggcgggcgtgcatgtttacttctgaagggttttgttgtaggcgtccagcgccttgcggaattcggagggcatgtcgtccgcggacatgccggtggatttgggaacggagcgcgtttccgtagccatgtccggattggaaacgcccttctcctgggtggaggccatgttggattttccgtccgctccgtgtccgggattgtttcccttgcctttctgggagccgttctgtccttctccttcgccttctccctccccgtcctgctgttccgcagactgggaatcgttgtccatgcccagtagctggcgcagcatgtccatcagggcctgtcctccgggcttgggttgtccgccggctccggtcatcttggccttggcggcctggtagatcagctcaatcacgtccgactgggcggccagcgtctggccgcccgtattgtaaacctccagcaggtccacggcgtcattcatggcatggcggcactttttcagcaggtccaccacattctcattggtttctcccaggatcaggtcggaggtgtccgcctggagttcgtcctgttgtccggccagcttggaggccgtttccttgtgcttggcggaatattccggagcgggctccggagcggcggcgcagggcagggaaactgccagaatcagggcggaaaggttcacggtattcatggggctggcgcagtaagggttttgcggtgttcctgctcggcggcgcgggtgcgcatgcggatgtcctgttcctgctggatcatgcggatgattttcagcatgaactcgaactcggcgtcggaaatggaggcctggtcgccaccgccgcttccgccaccgccgccgcggctcttcttgtaatcgtctatcagcttggcccagtggcgcagggtggaggcatacaggcgggattcgtcaatggagcgggccgtaatcgcgtttaggatgttgccgtgcaccaggtccagcttttcgcggagggagaaggcgctcatctggttgtacaggtcgctgtaaatgcgttccccggtgcgggacttgtaatagctgaggtcttccagaatccagccgatgtcctgcgtggaggcgttttgaagggtggcgatggtttccatctcccgtttggtggaggggtcaagttcatccatggtcatgcccacaatgatattgatctggccagcaagcgcgttcgcgatggaatcctccttggcggcggcctgcttgagccgcgccacgaaggtgctggcctccatgtcctgcgcggacttggaaagctggttcatggcgtctttaagcgcctgggtggcgtccgaatgggagctctccccgtcgtccaggtccttccggctctcctgttcggagcggttctcggaggcggaatcccggaactgcttctgcgccttcttcatggggccgttgggaatgggcttgagcatggagatgcccttcatgaactccttcatgccggaggggtctatctgggggttgcgggaagcctccttgaacaggtcctccgagcggttgagcaggtcgctcaattcgcgcctgttggtctgttcttcatccgccagggcgtgcaggcgttcctgggactccgcctttttcaattcactgccttccattcctttcaggcgcttcgcctcgtccgtcatggcgtccatgcggcggatcatcccctccagctcgctggtgatgcgttccagttcattgcggatcatctgggcatgctctgatttggaaaggacgaagatgatcatgggttccgaataaacgcgttttcccccgggcttgtaatcctgcgtgaacccgcgcacgacgacgcgctggggggacaatttcagcgccctggcctggaacaggtacgtctctttcaggctggcctgggtgggatggccgtccgccagaaccttttccccgcgcaggccgggaacgggcttgcctgccttggccgggtccggagcggcggtgttctcttcctcatcgtcataaaaagatttttccccctgccattccacccccatttcccggaggccgaaatcgtccgccgcctccacctccaattcaatgctggtgtcttccagcacgtagcggtcattctcccctcctctcaggtaaatggaaggctgcttgtcctcaatgggttccaggcgtatccgcacaggctgggaggtcgcaaggccgtcgctgtccgtccaggtgagttctatttccctggggtctttttccaggcggatatccggaatgacaacgctgctcccttccacgcggagcggcttaccctgcgcgtccgccgcggatgccaggttctgggaggcagtcaccttcaacgtcagcgtggagccttccggggcggaaatgacgcctgcgcgcatggcctcctgcccgtcggggcgcgccatataggcggggtaggccacggtggccgtagcgcccagcagggaggggcgggccttcggaatgattttcagccgccgcacgacgtcccccgcgaaaaactccagcctgtccgcctgctgcatgggaggaatgtggattttatacacgccgtccgtcaggggggcctgctggcgcaccctgttgcggaagaaatactctgccgtctgcgggcgggacttggtggcgttcgccagtttgagctcatacaggtagctttcccccaggggaatgaccagggaatccggcgtagggtccagctgggtgaacgtatagcgttccggaggatcgaacggttggagccagcgttccagggcgttccccgccgcttccgggctcaccaggcatacgcctgccgtgcataaggccaggatggccagcaggacgaacaatttcttgtggctgggcctggggatattcaccgtcagatcccgcgcggacacttcgcgggccacctgttccatggcggccgctttcaatttttcagaactgtactggcgcccgtacttttcggaatccagttcgatgacgcccaggagccggtcccccagcgccgcatccgtccgggaaatcaggcgcgccaattgggcctccgtgcgcctctgccacacccaccggaagctccaccacgggataaacaccgccaggccggccatggcggtgaaaaaaagaatccagcccacggcggagggcgtttcccacaatctgtcggagaggtacagaagaacgtaggaaaggatcacggcaatgcctgcaaggcatacggcttccagcatcttaaccgttctgaggcggcggcggaaggagtgaagctgcctgaccagctgggcaggaagtttgacggtagttgaagggggcatgcttaatcccggtatttacgctatttacatcgtttttgcaagctcgccgcgcgtgatgtggtaaattcgcgttcattgggcttggagtgtttttctcgctggactttatagtttgatttcctaaaataacgctgcgctttaaatctggcctggtttgcgcatgactaaaaaccaacatattaggccttacccattgacttcgccatgcaacagggaaacaaaacaacggctccggaggttgacttcggagaattcgcaccagccacatacgccgaatggcgtgaggcagccgtcgctgccttgaaaggggctgactttgacaagaagctttttaccaagcttgtggagggaatcactctgcatcccatctataacaaatgggatgaacacgctccggtggcgcctgccgggcaattcccgtaccgccgcggaacgcgcgccctgggctatatggaaaagccctgcgaaattgcccagagcattcccgcctccactccggaagatttcaacggcaagcttctgcacgatctggaccgcggcctcactgccgtgaacgtccagctcaactgcaagtgcggcttgaagctgcgcaagcaggccgactgggataccgctctcaagggtgtgcagcttgacaagctgcccgtgtacatcacgcccggctcctgcggcctgggcactttctccatgttcctgaacacgtacaaggcggccggattcaacacggcggacctcaagggcggcgttctgtacgacccggtgggcaaggccgtgatgaagggctccctctgcggggggaagggcatctgcgcctactatgaccagatggcggtgatgaccaaatgggccgtcgccaacgctcccgccttccagaccatcggcgtcagcggactgccttatgcggactccggcgcttcctcctttgaagaagtgggctccatgctctctaccgctgtggcctacctgcgcgccatggaggaacgcggcatctccgtgaatgaagctgccgcgcacatgcgctttacggtctccattggagccaacctgttcctggaaatcgccaaaatccgcgccctgcgcgaactctgggccatcatcgtgaaggaatgcggcggcagtgaggaagctgccaaaatcaagcttcatgcccgcacctccttctggaccctttctaaggtggacccgtgggtcaaccttctgcgcggctccgcccaggccttctccgccatcatgggcggcgtggacagcattgatgtgctgccctttgacgcggccgtgcgcatgccggacgaattctcccgccgcatcgcccgcaactgcccgctgattctgctgggcgaatgcaacctggacaaggtagtggaccccgccggcggttcctggtacctggaaaacctgacggacgaagcctcccggaaaatctgggacgtcttccagggcattgaaaaggaaggcggcatcatcaaggccctcaaggccggttccattcaaaagagcgtgaacgctaccgccgccaagcgctatcagctggccgaccagcgccgccaatccatcgtgggcgtcaaccagtacgtcaacctggcggagaaaaagctggaaacgccggaaggcgccgcctgcgccgctcccaagggacacggctgctgcaaaaatgcggacgtgcagctcccggaagtggaaatgagcgtggactccgcctgcaaggccgccagtgaaggcttctccacctgccttatcaacaaggctctcgtggccggcgccgactgcaagtgcggcgaaccgctggaaatggaagccctgccgaagcgccgcctggcggaacgctttgaatccctgcttgccaaggccgatgcctgggtggaggaaaaaggctcccgcccgatggtattcttcgcgaacatgggcccgctgcgccagcacaaggcccgtgcggacttctcccgcgacttcctgcgcgccggcggcctggacgtggtttacccgtccggcttccagaccccggaagacgcggccagggcggctgcggaaagcggctgcgccgtgtgtgtgatctgctccacggacgacacctatccggaaatcgttcccgccttctgcaaggcgctcaaggaaatcaagccggacatgatggtggccctcgccggttatccggccgaccatgtggaagcgttcaaggaagccggcgtggatatcttcatccacgtcaaggccaactgctacaacaccgttgaagctatccagaacaagatcggcctctaacaaccaccaacctatttcattcaatgagcaatattcctgattttgcatccgcctcctatcctgaaatcaaggccggcgccccggccacggcttccggaacggaaacctggatgaccaatgaacagattcccgtgccgcccacctactcggaaagcgtgtacgacgactgcctgcacttggacttcacggccggtgtggcccccaacctccgcggaccgtatgccaccatgtacgtggctcgtccctggaccgtgcgccagtatgccggcttctccacggcggaggaatccaacgccttctatcgccgcaacctggcggcgggccagaagggcctctccatcgcctttgacctggcgacgcaccgcggctatgactccgaccacccccgcgtggtgggtgacgtgggcaaggccggcgtggccgtggactccatcctggacatggaaatcctcttcaagggcattccgctggacaaaatgtccgtttccatgaccatgaacggcgccgtgctgcccgtgctggccttctacatcgtggccgcccaggaacagggctgcacgctggaccagctctccggcacgatccagaacgacattctcaaggaatacatggtgcgcaacacctacatctatccgcctgatccctccatgaagatcattgcggacatctttgagttcacctccaagtacatgcccaaattcaactccatttccatctccggctaccacatgcaggaagccggcgctacggcggacctggaaatggcgtacacgcttgcggacggcctggaatacgtgcgcaccgggatcaaggccggcattgacattgacgcctttgccccgcgcctctccttcttctgggcccagggcaagaactacttcatggaagtggccaaaatgcgcgccgcccgcgtgctgtgggccaagctcatcaagcagttcaaccccaagaacccgaaatccctggccctgcgcacgcactcccagacttccggctggtccctcacggagcaggacccgttcaacaacgtgacccgcacctgcattgaagccctggccgccgcctgcggccacacgcagtccctgcacacgaactccctggacgaagcgatcgccctgccgacggacttctccgcccgcatcgcccgcaacacccagctccatcttcaggatgaaaccaccatctgcaaggtgatcgacccgtggggcggctcctactacgtggaatacctgaccaatgagctcatccgcaagggctgggcccaccttcaggaagtggaaaaactcggcggcatggccaaggccattgaaaccgggctgcccaagatgcgcattgaagaagccgcggcgcgccgccaggccgccattgactccggcaaggagcccatcatcggcgtcaacaaataccgtctggaacaggaagccaagatggacattctggaagtggacaacaccaccgtccgggacgcccagatcgcccgcctgcagaagctgcgcgcggaacgtgactccgccgcgtgcgaagctgcgctggaagccctgtccgaatgcgcccgcacgggggaaggcaacctccttgaccttgccatcaaggcggccaaggcccgcgcctccctgggtgaaatctcctccgccctggaaaaacacttcgggcgccacaaagcaccaatcaaactcattaccggcgtgtacgctcaaacctatggtcaagatccgctggtggaggaagtccgcaaaatgacggacgacttcgccgaacgcacggggcgccgtccccgcatcctcgtcgccaagatgggccaggacggccacgaccgcggcgccaaggtggtctcctccgcctatgccgacctcggctttgacgtggacgtaggcccgctcttccagacgccggaagaaaccgccaaaatggcgattgaaaacgacgtgcacatgatcggcatgagctccctggccgccggccacaaggtgctgctgcccgccctggtggaggaactcgccaagcagggccgtccggacatcctggtcttctgcggcggcgtcatccccgcccaggactatgacttcctgagggaacacggtgcggtggccatcttcggcccgggcaccaacatcccggaagcctccaaggaaatcatggaagccctcaacgagcagtacgccgactaaggccctcgttggaaaaacagcatcaatcatcagggagccggatcacgggatccggctcccttttttgtgagctccccggactctctccatagggagctttcatccggaatggcagtgaatggacctgatgaacagagtggacttaatctttactttgtccatgaagtccatgaagtccatgaagtccatgaagtccatgaagtccatgaagtccatgaagtccatgaagtccatgaagtccatgaagtccatgaagtccatgaagtccatgaagtccatgaagtccatttccgcggcaatggaacaacactgcctccacagaaccctctggtccaaaacccccccttttcttgcttttgcattgccccttgcggtcaaattccgtagtctcgtcccgccgtgagccgcacctaccgccattgcctggactgcaaaaaaggattgattcctgccgagaccgacatcttccgcgtgattgacggggaaggggacgggcgcctgggcgtatttgtggaccaaatgggggaccgcgttctggtctccacgcgggactgccccatccccacggatttggaacgcgaacttcgtgaactgggcatgcccgtattccacaaaaagctggaacagaaccagaaagaagcgcccgtgcaaatagccggaccggaactccccctgcaatttacggtcacggagcagggcgtgcgtttcaaaatagacatgtccaccggttattcccagggaatctttctggaccagcgcgaccaccgccgccaggtgagggaacggagcagacccggcatgagggtgctgaacaccttcgcctataccggggccttttccgtatatgccgccctgggaggggctcagacgaccacgctggacctggcgcagccctgcctggactgggccagggaaaacttcagcctgaacggcattgatccctccacccagtacttctgcaagggggacgtccgccgctggctggaacggttcgccaggcagggccgctccttccacggcattattctggacccccccacgttctcccgggatgaccggggaagggtgttccgggtggaatcccactacggggaactggtggcccaggcgcgcgaatgcctggaacccggcggctggatgctgtgcaccagcaactgccgcaagctgagccatgaggacttccgcaggatggtggcggaggctcttcccggcttccggctgacccatgatcccatgcctccggacttcaccggagaggattatctgaaaagattgtggatagattggaaatgaatattttatgaaaaattttcctcacctccgctgacgcattttatccttttgaaagccctcccggtctggtaggaaaccgcccaattactttttctatgaaaaaactagcctatgttgcgggactcttcgcgcttacgtgcgcccctctgcttgccgccctctatgaaaacctggaggtgggaatggacaaggaccaggtgctgaaaaccctgaggcagagcaagcagcttgaagggccgcccacggacgccctcctttcacgcaccggcctcaacggcgtatttaagaccaaacagtccatcggcggccagaccttttccctgaactttgactatgacccctccggcggcttgagggccgttgtcttctactcccggagcaaatgccgcggttccgagtatgaaaccaaattgaaatccgcctacaaggctcttctggtgggcctgacggaaaaattcggggaaccggcgaacatgccggaatgggtggccaaggaatcccttcaggaaggccgcatccagtacatgcacatgtggagggtatcccccggcgtcttcctgatgtccggcctgggcaacatgggagccatggaagggtatttccccctcttccgcttttccgggccgtccggcatgccccccaaatccaaaagggaccgggaggaactgaagagggaatgggccgccatcccggaattccccggattgaaggaggcggaactccacatctccgatgccgtgcgcgccatgggcaccaaaaaatatgaagacgcctttgaatgcttccagcaggcggcggaactgggcagtccccgcggctactggggcatggcgttcctgtctgagctgggcaaatacggcgtgaagcgggacaagaaaaaagcggatgaaatgaaccgcaaggccgctgctgcgggctatgccgcctccgcctccaaatttggcgccacgtggccggatgccgcgcgggccctgggcctctccgccacggcagccagggaacagctccatatgcgccagcgggcggctgcggaaggctatgcctcggaacaatacaacatgggcatcatgtaccacaccggttttggcatgcccaaggaccctgccaaagcccgtgaatggttccagaaggcggcggaccaggatgacgtgcaggccaaaagcatcctgaaaaaactccagtaactctttttccaatccattactatcatgagcctatacgcacaacaactcgttcgctaccctgaactgggcatctcccttgacttttccaaacttcctctggacgacgccttcctgtcctccatgcaggggcggatagacagggcgttcgccgacatgaaggcgctggaatccggcgccattgccaacccggatgaaaaacgcatggtgggccactactggctgcgcaactccgcactggctcccacgccggaactgaaagccgccattgatggacctctggcggacgtcaaggccttcggccgggatgttctggacggcaaaatcacgcctccccgcgcggaacaatactccgccgccctcgtcatcggcatcggcggttccgcccttggcccggaactggtggcggacgccatccctgccgctgggctggacatgttcttcctggataacacggacccggacggcatgtacaaggtgctggaatccctgccgctggaagaaacgctcgtcgtcgtcatctccaaatccggcggcacgccggaaacccgcaacggcatgctggtggcccaggacttctttaaaaagaacggtgtggaattcgcgccccaggcggttgccgtcacgggggtgggctccaaactggacaaaacggctgaagcggaaggctggctcaagcgcttcccgatggaagactgggtgggcggccgcacgtccgtcatgtccgtggtcggcctggttcccgccgtgcttcagggcgtggacgtggatgaactgctggaaggcgcgcgcctgatggatgaaaagacccgccaggactgcgtgaaatgcaacgccgccatgaagctggcgctggcctggtacaaggccaccaacggcaaaggggaaaaggacatggtggttctcccctacaaggatgccctggtgctcttctccaaataccttcagcagctcattatggaatccctcggcaaacggctggacctggatggcaacgaagtctgccagggcatctccgtatacggcaacaagggctccacggaccagcacgcctatgtgcagcagctccgcgacggcgtgaacaacttcttcgccacctttatcgaagtgcgggaatgttccgcggacgcggtggaagtggaagcgggcgccacctgcggagacttcctccagggcttcctgcgcggcacccgccaggcgctggcggaatccggccgttcctccatcaccatctccattccggaagtgaacgccaaaacgctcggcatgctgatcgccctgtttgagcgcgccgtctccttctatgcctccctcgtgaacatcaacgcctaccaccaacccggcgtggaggccggcaaaaaggccgcggggaccttcctggccctgctggggaaagtaagggcggcccttggctccaccccggaaaccgccgcccaggtagctgcccggctggatgcggaccaggaagccgtgtaccactgcctggtgcatatcgcctccagtgattcctccgtcaagtgggtccaggccgcctgcgcggatgaagacaccttctgcaaggcgtaaaaataaaaaacatattccttccggcggacgcttatctggttgataagcgtccgctttttatttacaaggaaacgcccctgtgaagcctgccaccgctgccggcgtcctcgtgaatccttaaagctgtcttgaagaaccccaacttcagtcggagacttatacgttccgaaaaactcggattaatttaatattctctctcaaaatcatgaaacctattcttctggcgggaagctccttgctggttctttcctcctgctccattacccaggaaagccctgtgaacataaaaggcctttccaacgttttgtcctccacagcctcgcaagaattgcagagggcgggggaggaagcatgccgcaaggccgggtacagcaacttcagttccaatattctggttttttccacggatgtatcctaccattttacgggccgcgcaatcctggacatcgaccgggtgacaaggaagcaaattcaggatatctgttatatttcggaacctcccaatgtgcggatcaagggtaaaatgacggtagcccgcacccggaactatagaatcccggggatcattcttccattactccgttggacgggcggcaccatttatgtggaatgtcccgtagatatcctttattacgagccggattcctccttccgggaatcgctttgaaaaatgcagccgggagcacggagacggggagaaaaagcggaagatatttttccctaaaaaacataaaaaacatttccgttttccgtacaatttcgagttgacaaagcgaggggcggcgggcatccttactcgaccctaactcgctatcgggtcttttgttggctcctgtggttgatgtttgggcagaatcattaattcgactacaacaatcgatatgtccaccaattcctgcgcatgcagcgcatctactgacaaattcgtctattccttcggcggagggtccgccgacggcaatggcagcatgaaaaatcttctgggcggcaagggcgccaaccttgcggaaatggcccgcattggccttcctgttcctcccggattcaccatcaccacggaggtctgcacttactactacgatcacggctgcacctatcccgcccagcttgacgcgcagatcaaggaaggcattgccaggatggaacagatcctgggacgcaagttcggcgatacggaagccatgcccatgctggtagccgtacgttccggcgcccgcgaatccatgcccggcatgatggacacgattctaaacctcggcctgaatgaaaaatccgtggaagccatggtaaaggccaccggcaacccccgcttcgcatgggactgctaccgccgctttgtccagatgtacggcgacgtggtgctgggcgtgcagaagaacccggatgaagaccacgaaccctttgaagccgccatcgccgccatcaaggaagaacgctacggcaacgcggacgtggaagacaccaagctctccgcggatgacctgaaggaactggtctcccgcttcaaggcgctggtgctggaacgcaccggccatgaattcccggaatgcccctgggaacagcttcagggcgccatcggcgccgtgttcggttcctggaacaatgaccgcgccatcgtttaccgccagaaatacggcatcccgtccgaatggggcaccgccgtcaacgtgcaggccatggtgttcggcaacacgggtgaagaatccggttccggcgtggcgttcacccgcaaccccgcctccggggaaaacgaattttacggtgaattcctgatgaatgcccagggtgaagacgtggtggccggcgtgcgtacgcctgctcccgtagcggcccttcacgacgtgatgcccgccgccttcaatgaactgatgcgcatccgcgaagtgctggaaaaccacttccacgacatgcaggactttgaattcaccattcaggaccgcaccgtgtacatgctccagacccgcaacggcaagcgcaccggcgtggccgctttccgcatcgcctgtgaaatggtggagcagggcctgatcgactggaaaaccgccgtgcgccgcatccccgcggaccaggtggaccagctgctgacccccatctttgaccgtgaagccatcaagcaggccaagatgctcacccgcggccttcccgccggccccggcgccgccaccggccgcatctacctgaatgcggaacgctgcgtggaagctgcggacaacggtgaaaaagtgctcctggtccgtctggaaacctctccggaagacctgcgcggcatgattgctgctgaaggcatcctgaccgcccgcggcggcgtttcctcccacgcggccctcgttgcccgccagatgggcaaggtctgcgtctgcggcgctgatgaagtcatcgtggactacaacaaccgcaccgtcaccgttggaggcatgaccttcaatgaaggcgactacatgtccatcgacggaacgagcggcctggtgtacgccggcaaggtggaaacctccccctctgaaatcatccaggtgctgatctccaagaccatgaagccggaagacagccgcacctaccagaacttcgccaggctcatgcagtggtgcgacgactgcacgaagatgaaagtgcgcaccaatgcggactcccccaagcagacggaaaccgccatcgccttcggcgctaccggtatcggcctctgccgcacggagcacatgttctttgaaggggatcggatcgacttcgtccgtgaaatgatcctttccaccaagaagagcgaccgcgtggccgccgtttccaagctccttccctaccagaagggcgacttcaagggcatcttcaaggcgctcaagggcctgccgggcaccattcgcctgctggacccgcccctgcacgaattccttccccagacgaaggaacagcagcttgacctggctcagaaaatctgcatgcccgtggaagtcatcatgcgccgcgtggctgaactccacgagttcaacccgatgctcggccaccgcggctgccgcctcggcattgcctatccggaaatcacggaaatgcaggcccgcgccatctttgaagccgctgtggaagtctcccaggaagaaggcttcgccgtggtgcctgaaatcatggttcccctggtggctttcaagaaggagctggacatccagaaagccatcattgacaaggtggccaagcaggtatttgaagaaaagggcgccaaggtggactacctcgtcggcaccatgattgaaatcccgcgcgccgccgtcacggctgacgaaatcgcggaaaccgcccagttcttctccttcggcaccaatgacctgacccagacgggcctgggcatgagccgcgacgactccggctccttcctgccgcagtaccaggaactggaaatcatcaagaaaaacgtcttcgcctccatcgaccaggaaggcgtcggcaagctgatgaagattgccgtggaactcggccgctccacccgtccggacatcaagctgggcatctgcggcgaacacggcggcgaccctgcttccgtcaagttctgcaacacgctgggcctgacctacgtgagctgctccccctaccgcgtcccgaccgcccgtctggccgccgcccaggcagctttggaacaggcgtaagccttttttgttaagggttaatagacagcccgtggttctccggaaccacgggcttttttgtggagacgggggagggatggactaaagggacttgatggacggagtggaccaaaatattaaataagaagattatttgcctctgtgtttgcgctgttccagccgtgcgcgggtcatgcgttcacggatgccgccgttctgcatgaaatccttttcctgggcttgaatcaatttagcaagcaggccaagggctacgttaatgaggataacggctgtatttgctccaaaatggtccgagcggaaattcctgtgcttgcccacccaccggataacttcctgtgcagaagaaaacctggccctgatcagctcttgcgcgtaaagactgttgttttcccactgttccaatccccgctggcgcagataggaaaggtagtcttcctttagttcctgaaggcttcccttggcaattcccgtcagtttcaattcagacgctttgctgactcctgaatccacgctcccttccgcgatattctgcatgccggaatgggctgcctgaaccatctggtcataagtccggccttgatttttcacgtatttattgcagaaccggaacgtgaaatcataaatgatctccgcaacccggtataccaccagattccggtatcctccatgcttgggaataaatccatgagacattccgtccatggagttcatcctgttcatttattcccattttgtccattaaaataaataaactccaaattttctcctcacccctccagcgccctcttcagcagcttccggtattcccccgccggaacctcgtacgtgccgaacttcagcaaatgcggcgtagtccactgcgtatccagaaaaaggaactggtgggcccgcaggtactgaaccagggctaccagggcaatcttgctggcatccgttttccggtgaaacatgctctccccgaagaacgccttccccagggagaccccgtaaaggcccccctgcaatccttcctcatcccagcactccacgctgtgggcaaatcccatctcgtgaagcctgccgtacacttcctcaatctgcccgtctatccattgttcctccggttcgtccgtccgggcgcaggcatggaccacatccggaaaagcggtatccatccggagttcaaaaggttttttattcaggacgcgcttgagaccgtgagggatgtggaagcgttcgtccagcggaatcagggcgcggggatccggttcgtaaaaggaaatttctcccgtttccgggtccgccatgggaaaacacccctggcagtaggcggaaagaaccagttccggtgtcagtctgggattcatctgatatggtccagcagtttgccgaggacgggggaattcagggccttgcggtccggggaggccatgggcagctcgtgcaccttatccagaggaaccagttcctccccctccagaaaagccggggattccgtcacatggtggatgtagcgggtcaccttgtagcgggtgacgctgtaggtctgtttcagcacatggggcagggaaagggtatggtcgtcctcccgctgggggaaacggtacatgccggcgtggcgcttcccttccgggcatcttgccagcaggatggatttaccgcggaggtagagaacgtcgtggtgttccacccgggtaatttccggcttgggattcttgacaggcagcatttccggctgctccgcggagcagaaggagcggacggggcagagcaggcagtccggcgcgctgatcctgcagtaggtctgccccaattccatgatggctgaattgaattcgcgggcatgttccggatccaccagattttccgcgcgggtccacaggtacttcaacccttccgtggaatccacaggcacggaataattgtcaatgcgggccagcacgcgcgccacattggcgtctacgatgggggcggccttgttgaaggcgaaggaaagcagggccccagacgtatacgggccgatgcccggcaggcgtttcagcccttccgggttgtccgggaactctccgccgaatctgtggacaatctccctggcgatggcctggagggaacgcacgcggcggtaataccccagcccctcccaggagcgcagggccgtctgttcgtccacggaggccaggtgcccgggagtggggaactggcgcatccaccgttcataccttcccagaacggtgggaatggtggtctgctgcagcatcagctcggaaaccaggatgtgccatgggtccgtggtccggcgccacgggtaatccttcccctcccgccggaaccactccaccagcgcgttccggaaagcccggatgtcaaaatcgggtttggtgtcaggcatgcttttgttcaagggcttggcgcatgacggaaatgtccggcttgatgccgaaccagcgttcaaaggaaagggccccctggtgaatcagcatggagaggccgttggagaccctggctccctggaagcgggcttccatctggaaagcgtcgtcatgcgtctgtaaatcatacaccaggtggtgggcggaaagcagggcggacggcacgggggacgggtccgtaggtttcagtcccagggacgtggcgttgacgatcaggtccgcttccgccacggcggaattgaaccgcggcgtgttgttcaggtgggccgccagacggtcggatggtccttccagcctgtgttcgtcaatgaaaaaggaactcagtttgtccttaagggcctggagcttttcttctgacctgcctgccagcgtcagccgctcgcagtgctgcatggcgcaggtgtaggccagggccagcccggccccgccgcaggcgcccagaagcactaccttcaaatcgcgcaggtccacggaaaattcttcccggatggcgcgtccaaagcccggaccgtccgtattgaagccggaaacggagccgtccttttgaaagacgagcgtattgacggaacccgtagcgcgggagagggcgtccgtatcatggcacagggagcaggcggcctgcttgtggggcaccgtgacgttggctcccaggaatcctttttcccggagcaggcgcaccacgtccgcaaactcttccggagaagcctggatgcggatgtagcgcgcacggatgcccgcggcatccagagcggcttgctgcatggcgggagatttggaatgggcgatggggaagccgatcacggccagtctggcgggaacggattctccggcatcaaacggatgttcttcatccagaagatcggccagggtgtagtagggtttcatggaaagatagaggaacgggctcaggcgttcacgctgtactatgaatgaaattacgccggatttcaaggcaaacgcctatcattccttcttccgggtgttttttgccggtggccggaacgcgtgaagacggcgctgttttttagccgcacgccgggcgggaggtcagcagttgatcccggctttcttagcctggctgcatagctgcctgacgtgcagacggtacattttcccgtctttgatgaagttggtcccgcattgcctgaattcaaaatggaccttgttccggatgcattgttcccggatggataagacccattcgtagttcaggggcctggcgcagctgttggattccccgcctgcgacaaccagttcgatctgctgtaaatacggggccaggtccacctgctcaagaagcggctggcagatgatatttttatgcttgatgggcagactgttgaagatggggagcctgaaatccgccctgtcctggttttccaccgtgcagcctacggtgacgttgtcatagccgtccccccagtcaccggggaggcattccatgaaccgctctattcttttggtcaggaaaataaagttcaggtcccggcgctcccggatcatgtcccagcattcgccgcgccacgggtccgcctcccggatgagaaaatccgtagagaagcccagatacacggtctggccgggtttcattctgtaatctccctttttattcttcagcacgggggcatgaaaattgtccgttttcacgatctcgtccgtatccattccccgccgtctgtcggcctgatggatataacagaatttgcacccggcgctgtaccggtggcatccgcgccatgggttccacatagccatttgattacttccgattaattggagctggggaaagcatcagcaaggcggaacccggaagttgtccgggttccgccttgaaataggggggtacgggaataatccgtttaccgtttattccccgcagccgccgtccttgtagccgcaggaacggcaggacttgcacttcccgtcctgcacgtaggccagggaatggcactgcgggcacagggaagcgccgttgagcatggtgccttccggcgccttgccggcggtaatctccggaagagccggggtctgggtgtgaaccggagtggtgatgatgcgggggggcagcacgctcaccgtggtgtccggagcctggccgggcaggctgacgctcgggatggagaacacgtcccgcaggcggtagccgttgctttccgggaagagccacgccagaatcttggcgatcaggtccaccacggaggcgcaggagcggatttccgtgcaggtgtccgcctccgtatcgtcccccacgcggcagaagccggagggctcaaaggagtaattgcggaagcccttgaccacttccttgagcggcacgccgaactggagggccgtggagagcaatttgcaataggcttcaaacatgccggaggcgaaggagcccacctggcccaggcggccgaagacttccccgcaggtaccgtccgcatacacgcccaccgtcagatagcccgtcagctggccgcccacggagaacttcacggtctggcccaggcggcggccgggcagcttgcgctggcgcggcttggacgcttccgcaataatttcgtcaatggcttccgttccggcgttcaccagctgttcccatacatggttggccttgaacatgcgggtttctggcgtgtctaccacgtaaacggcgttcgccttggagccggcgcggaagatggcgatgcacttcacgcccaggtcatgggacatgatgagggaatcgtagacttcctgcacggtggcggagacgggcatattcaccgtcttggagcacgccccggaaatgaagggctggagggcgcccagcatcagcacgtggccggcgggggagatggcgcggatgccgttgccgttggtggcggcgcagtcaaagaccggaaggtccttcttgtccagccacgggatggactcaatgtgggcggagccattgatgacggtcagttcatccgccgtcagcacggacatgttggccgggttgctgatataggccaccttttcctgaatctcgctgcgggattccgtgccggagagcaggcggcgccacgcgaggcgcacgggtccggcctggtcgttgcaggggtccacgatgagctggttcacgacggcgtccatattcccctggaacgcggaaatcaggccgtccaggccggccacttccagggcggcttcattgacgaagtcttccgcatagcccagggagcgcaggccttccagggccaggcggttgaacattttcagggagcctccgcccgcaagttgcttccatttcaccagcgtgtaatccggttcaatggaggtggtgccttcatcataacagcccagcggggcggagatggtgcccgtgggggccatcacggaaacgaaggcgttgcggtgcgccgtagccttggcgaccttggcccacatcccggaggcggcttccgccagcttggcggcgggggcgatgcgctccttgttcatcagggttggagccttgaagctcttgagataggcgtgcagggcgtaggaggcggtcagcccctgcgcttccggcagcactccgccggcgttggcgatgatgttctcaatcaggtcgtccaaagtcttggaatccttctgggcgggcagggcggtcgccagcttctgggccgcgttatgcaggcgcagcacggccagcaggtccttcttgctggcggggtattccacgtaggaacccagctccgcgcccatctccgcggacgccgtccagcaggccgccgtcagggcgctgcaaagctgggaggcaatccagcggccttcgtcggaatcgtacggaacgcccagcgccatcagggagccgcccacgttggcgaagccgatgcccgtggtgcggtacttgtaggtgccttccgcgatttcttcaatcgggaagccgccgcgttccacgttcaggtccgcgcagaccatcgccaggcgcgcggcatgggtcagggcgtccgcgtcgaagacgggcttgccgtcctcatccttcgtcaggaagcggtaggcgttgaaggaggaaaggttgcagctcgtattgttcaggaagacgtactcggagcaggggttggaggtagtgatggagccgatggacttgacggggttccagaggttgatcacgtcattgttgtgcacgccgggctccccgttgtcccagatggacttcgccatggcttccagcagttcctgggcccggaaagtctgttcaatgtgggccgggttcgtgacccagcgcgtgtaggtattgccgttgttggcgagggcctgccagaagtcgcctttcagggagacggaatggttcgcgttctggtgggaaagcgtttccccgtacagcagggcgtccatgtgcgggtcaaagctgttccgggtagccaggggcagggaaagaatgaggcgcgcggcggctttttccgccggggttcccgccaccagcttggtttccgcaatctgcttcagctccacgtgcacgttatgctcgcgcaggatcaccttggcgatgtcttcctggcggttcttcgtgctgatgaactcgaaaatgtccgggtggtcgctgaacatcagcaccatgcgcgcggcgcggcgcgtcttgccgccggacttgatggccccggccatgcgatcccagccgcggtcaaaggaaatggggccggaggagcgtcccttgccgctgatgggttccttggaggaacggagggtggaaaggttgatgcccacgccggaaccggacgcgaaaatgcggccttccgtggtcaggtgatccaggatgtcctccatgctgtcccccacttccgtcaggaagcaggcggagcactggggatattcatacgtggactggaccgtgaaggtcttcaggttgttcttggtgcccttggtgtggtaggccttgttgccgtggccggtatagctttcccgcaggtccgggcggccccagcgccactgttcccagtggccgatgttgaaccatacgggagagttgggagcccaaatctgctgcaccagcatggccttgatttcctcgttgaaaatctccgcgtcctccagcgtggcgaagtagccttcctcccagccccatacggtgtaggtgttggaaatgcggtcgtaaatattgcggaagctgtcttcatattccagggaccccggttcactgccgaaaaggtacttgtccgccgtgatcttgacggcgttgtcatcccagtgcgcgggcgcttccaggcccaggcgctcgtaaatggtcttgccggtcttccaatccatgatgcggacgtcgcggcgggtccagtccacttcatcatagggatggacttcgttgtgggaaaatcttctggtgaatttcagaccgcctagaaggtccttcctctgggggaggatgatttcctgtcctgtacgcagtttgagtatggtttgcgagttgtctatagtcatggcttgcgaagtagaaagcgtttgggagaaatcccgtgaggcagcgctccgtcgcggggttggggcggcgcgtagcgtttgcattatctactgaaaaataatcgcgatgaaaaggaaatattgtacagtctttttttctgtatcccacatgttgtgttttatcccggtttccgagaacttttgctcctgtcttgcgtgaattttttttgtctgcctgacactccattttttttgcttgacgggcgccttcctgcagaacgttattcgcctctcgcggagggggcttttccatgggaaacccccggcaataagaaggcgttaaggggccggatggatgggtattgcagcgtgtatttcctgttatgtgaaaaattcctgttgattattaccagtgaatgaattttattgattaataacatggtaaagcatctgatgtccatgccggttttctatccggttgggagcggcctccttctgctccccttcataagggcgccgctcttcacccatccggcaaaaagtcgttccggaaaagtctcaacaagcccttttaaaaaacatgggacaacattcctgggcttgaaacgaatgcctgccggctacggattttacggattaaaaaatggcttctcccttgttttttaaggcgggaagcaggaggaggaaaaggcttttccatctgcctcaaatgagccttgatgaacgtgctgcaaggcgttattttaacggccatgagattggctaccctgatctggttgaccggcgccgtgtgctgcatgccggttctggccgcagaccctcagcataaggaacagagcgccgcagaaaaggccccgcagccccggtcgcggaacgtctcccttcaatgcattgctccggcgcccggcttgccggtccccatggatttgacgcaggcggacggaatccggctgaacgccctggacgttaccgtgtccctgaaacagcaccaggcctttctgatttacacctgcgcgctggacatccccaaaggcgtcaagggcaagaccatctccgtgggcgtgccgttccagtatgatccgccggatgaacaggccaatgccgcaaagccggagcccatacgcaacctgccttttacgaaggcggtgcaggacgtcgtgacgtccgtggacgatttgaaatgtgattcctccctggtggaaggacggcatcttcaggcggacgctcccaccatgtcccccgttgccggaatcacccactggctggtggcccaggttcccaacaaggcgggtactcatgtgcttaccttccagttttccgtgccttatacgcaggatattgccattacgccggaaccgaaggtcaacatgggggaaccccgtctgacgctgctcgcctctccggtgatgacctggacgggaggcacccccagggcggtcgtgaatgtatacagctcggagatgaccaaccaatccgtcaagctggacccgtccgcagatgccaaatccattgtgactacgcccaaaggcgtttatacctggtccctgctgggagcggacggcaggccctatgcttcctccgtggtgctgacgcccggccccggctgggtgctggacaaggacggccaggtcaccatccgcggtgaaaagggaaccctgacggaccagtatgatgtgacggccagctctactctggagaaggacccctacggcgcactgtgctccccggataacctgaagaacggcaccggctattgggcggaaggcgtttccggagacgggcagggggaaaccctggaaatcaagctcaagaatccgggacggctgctgggcatcatgctggaaaccggcatttccccggtgaccaatccggaaagggatacggaagcgcggcggcatccgaacatagcctattccatgttcagccgccccaaagtcatccaggtaacgctgaacggtaattacacctttgacgccacgctgcgggatgactggacgccccagatcgtcgtgccgccgtactacaggcagcctgtgcacaccatcaagatcaggatagattccatctatcgcggaaccggaacgtcggacacctacatcggcatcctcaagcctattgtccaataaaaggctcgttccggcccttcttgtccggaatcgggagtccgcgcctttcctctttcgcagtagttccggcatgaacagcctggcgcggatggtggggcctttctcaatgatggaacagggaactgcccgtgcgtcctctgggataatggcggaagggaagcgtgagcaggtacatcagcacgagcgccggaatctgcatccacagcaggtaccagggccacggcccgaacaggtccagcacggagccgcccgcaggcgtagccacagtgaacccgtaattggtttccagaagcatgttgacggggtggacggcggccagatatacgttcgccagcagaagggcccacaggaaatcccaccgcgccggcttccattccagggccagcggcaggtaaagggccgtgatgaccgttacgccgtgggacaggaaaaaggcgaagtacgtccacgacgggaaatcgtgggccacggatggggtgagcagcccctgcaaggtggcgcacagcacgcagtagtacaccacggagcgcagcaggcgggagggaatccacaggctcagggcgcagagcacctgcatgacggagcagaaatgcaggggaagcatccacgtccagctcttttccggttcatccgccagcatggcggccaggtccggaaccaggctgaacaggcaggcgactcccagccagaacgtggtgcggttcctgacggttttcttgtaggactgccccagttccatgatgcaaactcccgccgccagaagaacggccaaagccgcccagtgggaaacccctgcaaattccagtggagggacgccgttcatgcaacggctaccataacagagaagggggggcgggggcaacgcgaaaagcgggacgggtttcagtcttgcaaattcgccttccccgggcatacttgcctgcggaatgaaacagggcttgttcatattggtcagcggcctgctgatggccggcctgaccggatgcgacgattccagcgaacggcgcgcccgctacgcggagaagaagcccgctccgcgccccctggaaagaacgtttgaccctcccaaaaaagttctcccccccgcggagcctaaaaagaaggcccccgtgtggatggactacaagggggaggacatgcggcagctcacggaactctccggccgcaaggtgctgattgtcttttatgccccttggagccgcccggccacggactacgtgcaggcggtcaagtcctacgccgcggcgcaggacggcaaggcgttcgccgtgctgattgacgcagacgcttatccggacgtggcccgcaagtacgggctggaagccgttccgctaacggtcctgtatctggaaggcatgaagctgaaggaaatggtcggcggcgtttccgccccccgcctgaacgaactgattgaacagaccatacgggtgcagtaaaggaatttcctttgcggcctctgcatggttacagggaaaaatgaccaattccctgtagatgaacactcgtcaatagtccggagaggtatattccttctggaggcgcctcttatatttcgtattggagacggtttggcaaaattccggaatgtgcaggcggaaggcgcatttatttcctcccgggacggagagattggaatgtttaattattggccatcaatgcttgtatttttgatgccctttattttcacctgattcctgcgccgtttcggccctttccctgtctgccgaatacgcgttgaacgtgttgatggggagaaggaaatctttcaaggtgaccatggactgaatgaccagttcattcaacaataaatgaattgaaaacataaacactatggctatatcaactataccatttcacccgctcgacgctgaaaataatcctcgttacaaggtgaagaaaaaagacgctcccaaaatcgtctggcacaagacggaagaaaccggcgtccatgactgggaaggatacatccgtatcccctttgacaaggaatatgcctttaccattcagatggacgacaacggctacctggaaatagacaaccagaaagtggtggaactcaaggacggcaactcatccaagaaggcggagggcaagaaggaactcaagcaaggttaccattacgtcaagctccatcatgagaacctgaaggttccggatgccattgccccctatcccaatgcggaagaattcgttcctcaaatggatggggctgacctggaactttgggaaattgatgcccccgtcaatctttggaagacggaggatgcccaaaaactgctgaaatgctacaatgtggtggattatgtcaccatgcccaatcccggacaggtttggtcctacatcggggggtggctctatcaggcccacctgaaggaaattgaggacaatgtacctgagcaattgcgcagctattataacagctgcgccctgcgcatgagtatcgcgctgagttccttcggaaaggacttgaagaacgaagcaggggcggagctcatcggagacaaggcgaatgccggcgcattgggaggtaaaacccacgtgatcatccgtgcaagggacatggccgcttatgtgcaaaagctcctgggcgacccggactatgccgacggccaggatacaggctattgcagcccgcagccgggcgacattattgtgtttgccggaaagggtcacgcaggaatgtgtccgggagacaacatctccattggcagtttcctgactggccccatttggttaatcaaccgggcgacattgaaagacgctgaataattcatcaacttcttttttacggagcgaatgctttaaaagcattcgctccgtttttgaacataatgggaaagaaagtaatctacccatttctatggataaaacaccactcttttgttgtttgttttccggactgatacccgtatcggccagcgcagcgccatcttcccccccctttcccacgcaggctgaagtggccgcggatgcttctctttacagcccggccatgtacctgcggagaagcgacattctcctggcggttattatttataagacggtagaaacggaccaggagataacgtactacgcccgcgtcgtccaatctctccggggagacattcctgtggaggctttgatccagtggagctgggctgcccataaacactctgcggtcagcttctccaaaccggaaccgggcagctcccctaaaacggaactgtattccggtaattatatgtattatacccttgcctcctccaaggaggtaaaaaaactgccggacacgccggaatcttttgctccggcggacagtatcccgggcctggattcctatgatctgggagacgacgtcatttacttcccgatgacggagagtgatcggggccgagctataaggaaactccttcatatcgaacccgccaggatcaccgcagaatcggaggccgcccgcttccggccctcttccggcaagtaacgccttactcttttttctttccctctttccggcaggcccttccttgttgcccgggcatgtttcatctccccgtccggttcctttcaggaagcaggcctttttttgtatttcagcattcccctccctgtcccggacagggggggaaatacatgaaaaaaccggttcacgtttccgtgaaccgggcctgaaaaaagggggaagtgttagacgcccaggttgaacgccctgtgcaccacccgggccgcttcctcaatgtctgactcgtccaccatcacggcaatcttgatctccgaggtggaaatcatgccggtcttgatgttggcgtccgccagggccttgaacgcggtagctcccacgccggagtgggagcgcatgccgatgcctaccagggaaagcttggcaagacccgcttccgtttccaccttcacggtggaacccagggcggccatgaccggcttgagggcagcctgggcgcggcccagttcgttggagggcatggtgaaagactggcggacgtagccgtcatgagcggtattggccagaatcatgtccaggttaatttccgcttctgccagggcgcccagtatctgggccgtgtagccaatctggtccggaatgccggtaatggtaacgcgggcctggttgcggtcaatggaaatgccgcggatgacgacggcttccatggagggagtttcttcttgcacgattgtaccggggttggtgttcatggagttgcgaacttcaaagacgacgccagattttttggcgaattccacggagcgcgactgcatcaccttggaaccgttggaggccatctccagcatctcgtcatatgaaagggtttgtatcttcttggcgtctttcaccacgcggggatcacaggtgtacacgccgtccacatctgtaaaaatctggcacacgtccgctttcagcgcggccgcgatggcgatggcggaaaggtcggaccccccgcggcccagcgtctggaccattccttcttccgtggctccctggaagccggcgcagatgaggatgttgccttccagcaggtacttgttcatcagcgtggggttgatgctgtggatgcggccacgcgtatggctaccgaaggtcgtgatgcccgcctgcgcccccgtgaaggacatggctttttcccccagctcgtgcagggccatgcagagcagggcgatagactgctgctctccggtggccatcagcacgtcaagttcgcgttcgcaaggggattcggacaactctttggccaggccgatcagcttgtccgtcaccccgctcatggcggaaacgacggcgaccacctggttgccgtctttggcggtgtcatggatgcggcgcgccacattgcggatgcggtcaatggtgccgacggagctgcccccgaatttttgaacgataagagccatgtaacaggatgatgatataggttaggattgaggaagaaggtgttcgatgcggagtacgcggggttccgccgccacgcaggaaatgcgggcaatttcctccagggccttctgaagctggccccacgggcaggaatggaggatgaaaacgaggtcgttccactgggctccgtcttcagcgatatggctgggagcggaggaggtggcggaaatgccgatgccgaaggtggccagaatgcgggctatctccgcaatgacgccgggctggtccgccacctggaagcggacgtaatacggggtgaccgtatcattgatgtgcatgattccgcaggacttggcatacggattgaaccccgtatggtattcaggatagcggctttcacgcatggcggtgatcacgtcgctgatgacggcggaggctgtgggatttttgcccgctccgcggccgtaaaacagcgtttcccctacaatgtctccgttgacggaaatggcgttgaatacgccgttcacggaggccaggatatgccagtcatggacaaaacagggctggacgcgcagttccagggcgtcttcctgcccttcatggtagcggatgacgacgaggagcttgatggtataccccagcttcctggcgaactcgaaatcccggctggtgatgttctcaatgccgctgacgtaaatcttgtcaggggaaatagtggttccgtacgccagcatcgccaggatgagggccttgtgggcggcgtcccagccgttgacgtccagggagggatcttcttccgcaaagcccagcttctgggcctggaccagggcgtccgcgtaatcggccccgtgttcccccatggcggagaggatgtaattggacgttccgttgatgatgccgacaatggaattgatatggttgcagatcagggaattctgcaggctctggatgatggggatgccgcctccggcggaagcttcaaaataaatgggcgtgcccatttccgcggaaagcttgaaaatctccgcgccgtactccgccagaagagccttgtttcccgtgacgacgggtttcccggcgcggagggccagcgtcaccagctcgtaagcctggcgcgtgccgccgatcagttcgatgacgatgtctatttccgggtcattcaccaggtcctgccagtcgtccgtcagcagctcctggggaacggcggtttccctgggtttttccagattgcgcacggcgatgcgcttgattctgaaaggaatcttgctccgggcttccagaagggagtggttgcggcacagcgtttcataaacgccggaaccgaccgttcccagcccggcaagcccaagttgtataggtttttccgtcattcctgccgggggattatgcaaaaaaatccctgtaacgcaagagcttttaccgtctggaaatgccacgtgaccctcgtccggagggcgtggaaacgggggaaagtggaaagggtggccgttactccgttcccctggctcctccggataatctccggaagtgcccgttccgttttctgttccaaattttgtaagggggaaatccttctgtattctccagaaataaatggagtggggggggggacgccatgttcattctgccgttgcctgggaatggaagcttgattagttcctcctgagcgcttcaagctatcctttctgtccaccaggcttgtctggtttcctggctagcgtatttaaaacattttccgcagcacagcggcggggaatttctctctttctttgtgccgtccggagtctaaaggggccggaacccttattcccggcgcacggccgtgaatgaacatgcgggaaggacggcttccttacgccgcggtggcatccctggtgcgctgcaggttcacgaaggttccgccaggacaaccgccgtgccgcaggccggcaattcactggggccgggggaaatctcactgctggcgaaatcgggcagggaaacggcgccggaaaaaggcagcaaaaaaccctccttgaagagagggttggattggcagccccaccaggactcgaacctagaaatactgaaccaaaatcaggtgtgttaccaattacactatggggctgtcttgcactggcattcctgccgttgcggggcgtagtaaaccatacggggcgtagtctggcaagagaaaaatgtcccggttccggcgtttggcggtcaatgttccggcttgatgatgcgggtatagctcaaccgtttgaacatcagcatgggaatggctactccgatcaccagggagaagatgatgaagaacgccgtgatgccgttcttgcaaatctctacaatcagccggttcatggtggccgtgtcctggttctcctgcatgaactgcatcagggccaggatggtcttgtaggcgtacacgcccggaatcatcggcagcagggaggggaaggcgaaaatctccgccgggcacttcaccagcttggccgtcatgacgcccagcatgcctatggtgaaggcggcgataaaggtagcgctggaaatgtcaatggaccaggaatgcagcatgtaaaaccggaaggcgtggccgatggccgccagcagggcggaaacggcaatggcgcgcttgggcggattggagatgacggcaaaccccgtggcggcaatggcggccatcaggccgtccaggaggatggaggaaagaaaatccggactcataagctgtttacccccacgatgagcatggttgcggaaaggccgatggtgatgcaggaaatcatcatgatggaatggacgccgcgtgagatgcccatcaggatgtggccgtgcatcaggtccatgatggaattgatcatctgaacgccgggaaccaggaacaggacgctggtggccagggcgatctgaggcgtggagccgagctggaagatgacggcgcacgcggccgccatggaagcggcgaaggcggaaaggataatgacgcccagcggattgtacttcaaccgggaaagctgctgttttaccaggaagcccagcagggtggcggcgaacacggtcagcatggcccacaggtccccgttgaacaggcggcagaaggcggcgttgcccacgctgaccagaagcaggtccgtccagcgggaaaacctcttggtgcgcacgatggagcggaacgcctgctccatctccgcaatgctgacgttgttgtccaccgggagccagctcaattcgctgagttgctggatcaggttcaagttgaacgccaggggcttcagcttccggacggaggtgcggcgcagcgtctcgtcatccttgcagatcaggctcatggtgatattgcgctggaaaatggtcatatccgcactgtacccgtacgcggcggcaatgcgggaaatattgcgcacggcgcggttggtgtgcacccctgcgcccataagcgtggtggcgtactccagcaggaactctgaaagggcctgtatttggtcggtatgctgcataaaggggaaaggcggaataaaaacgggaaagtcaggaatgggcggcctgtcttctggcggcgtaatccttctgctggtcctccccggtgacgcccacggaaaaataggtgctttccgggtgggagaacacgagggcgcagacggaggaaacgggctgcatcatccaggtctccgtcaggttcatgcccgcttcctcccgggcatgaagcaggccgaacacggtttccttctcccggtggtccggctggctggggtagccgcaggcggggcgcacccctgactcttccggaatattccacaaaaggcgcagcttgccatgggcgatggaagcgaaagcctccaccaggcggtccgccagggagctgaccagcagggcgcggtaggaatcattcctggcttcccattccttcgcccagcgcctggacccgtgaatgctgacggccatggcccccacataatccttcaccctctcgggagcgatgaaatccgccagcgccagcctggtctttccctgcttgttcaactgctggcgctgggtcagcaggatggcctgcggaacgtttctggattcatccgtccagacggtgatgtcgtcatggctggccgtggaattggccgggaaaatgccgatgacgccgcgggcctggtagcggttctcctttacggcctgttccagcaggtcgcgggcgtcctggtacagggccgcggccgcctccgccttggaaggatccttcgtccggaattcctgggcggcgcggttccaggagccgtgcaattcccaggcgtggaaaaagggggtccagtcaatgcgctcaatcagctcctccacggtcacgtaatagcgcggattgtcactgcagcagccgcagctcacggagctgtgcagactgccgatggaaaccgtccccagccgtgcgggcacggggggaacgtagccgtccgccgcccccttccagcgcaattcacgggcttcctccaggggcaggaggtcgcggacgggcttgttttcatgcctgttgcgcaactcctcctgccgggccttcacggcggcgatgtaggaatccttcttctcgctcaccagggaggcggccgcgggcaccacctgggaggcgtctaccgtgtgcaccacggcgcccttgtaatggggggcgattttcagggccgtatgcagggcggacgtagtggcgccacccaccatcaggggaatggtcatcccccggcgttccatctccgcggccacgtgggacatctcctccagggaaggggtgatcaggccggaaagcatcaccaggtccgcctgttccgcctccgcccggtccagaatggtatcacaatggaccatcacgcccaggtcaatcatctcaaaaccgttgcaccccagcaccacgcccacgatattcttgccgatgtcgtgcacgtcccccttcacggtggcgattacggccttccccgtcttggaggagcccttgctgtcctcttcaatatacggggtgagccacgccacggcctgcttcatcacgcgggcgctcttcaccacctgcggcaggaacatcttgccgtccccgaacaattggcccacggccttcatgccgtccatcagcgggccttcaatcacgctcagcggggaacccagctcctggaacgcctccgccgtatccgcgtccacaaactcggtaatgcccttgataagggaatactccaagcgtttggcgacgtcctgttcccgccattccagcacgggcttcttctccgttccggcctccgtcttctccgcagccagcttttccgcgtaatccgtcagtcgttccgtggcgtccggatcccggttcagcagcacatcttcaatcagcttcagcctgtccttgggaatattatcgtacacctccagcatgccggcattcacgatgcacatatccagcccctgccgggtggcgtggtacaggaaagcggaatgcatggcctcccgcaccgggttgttcccgcggaaggcaaaggacacattggaaatgccgccggaaatgtgggtgtgcggcaggttttgggaaatccagcccgcggccttgaagaaatccagggcgtaattggcgtgctccggaatcccggtgccgacggtcagcacgttcgggtcaaaaataatatcctccggcgggaactgcacgcggttcaccagcaggtcataagcccgtttgcagatgcggacgcggtcgtcgtaattggaagcctgcccctgctcgtcaaaagccatcaccacggccgccgcgccgtacctcttaatcagggccgccttcttcaggaactcctcttcaccctccttcagggaaatggaattcacgattcccttgccctgcatgcattgcaggcccgcttccagcacttcccacttggaggaatccaccatgaaagggacgcgggcgatatccggctccgcggaaacgagattaagaaagcggaccatggcctcggagccgtcgatcaggccgtcgtcaaaacagaaatccagcaccacggctccattctccacctgctggcgggcaatggataccgcttcctcataattcccttcacgaatcaggcgcgcaaatttgggggaacccgccacattgcagcgttcccccacaaaaagggtattcttctcccgcgtatgattgtacgcctcataaccggacaggcgcagcacgggctcctgcgcggttggaacgcggggagccaggccttccacggcagcggcaatggcgccgatatgttccggcgtggtgccgcagcagccgcccacgatattcagcaggcccagggacgcgtactccttcatgaaccgggccatgtcctccggaagaaggtcgtagccggtggggctgagagggttgggaagcccggcattcgcgtaaatggacacgtagcaatccgccaggccggaaagctcctccgcaaaggagcgcatcaggtccggccccagggcgcaattgatgcccacggaaaaagggcggacgtgacgaatggaattccagaacgcttcaatcgtctggccggacagcgtgcgtccggccttgtccgtcagcgtgacggacaccatgaccggaacggcggcctccggctgttcctcaaaaatctcttcaatggcgaacagggccgccttggcgttcagcgtgtcgaaaatcgtctccaccagcagcatgtccactcctccttccagcagggccagaacctggtcgcggtaggcttgcctcagctggcggaaattcacggcccggaagccgggatcgttcacgtccggggacagggagcaggtaacgggcatgggaccgatggagccggccacaaagcgcggcctgccgtctgacgcttccgcttcgtcacatgcctgacgggccagtgcggaagctgccatgttcaaatccctgaccagggccttcaattcaggggcatccaccacctcctggaaatactcctggtccttgcgccgtccttcttccggacggtgccagaagtaatcatgctggccgatgctggtagcgccgaaagtgcaggtttccagaatatccgcgcgacccgtatccagaaagcggcggtgaatatccagaatgatttccggcctggtcagcaccagcagatcgttattattcttcaggtcgttggggtagcgggccgcatccgcaaaacgttctccacggtaatcctcctcctccagcctgaacttctggatattggtgcccatggcgccatccaggatgacgaccctcttgcgcaactggtctttcagataatcaaggcgttctattctggatgctctggtcatacggcgcggaaaatctaacgttcgtccgtgtttggaacaaggacaattggcgtcacacatcctctgaagaagccttccctggaatgtacatttaaaatcccccttattggccctcattctgtgccgtggaaatgaatggaaaaccgtattcaagggaacaggaagctgatggccgatgacatgcctgtggtaaataaacaaacgctgcagggagtagctggcttccttcttccgctaaagaggaggtgacgggaaattccatatatccggtgcccggaaaagatttttttcctggcttcccgtaaataatggggcagttacggtatattcttttgggcgggcatgtggtcgtagctggcaccggcaatgctttagaaaacggtttttttggagtagggagagagatgaaaaatcactgcggaaaaggctacaaggaatgaaaagggaaaccgattgaatggtggattgctgaccggaagcttactccgtaattttagcctgtggcggcaggagtggaggaattggcgccggaaacaaacgcttcctggcatttctcccttcttaggccatgagaggaaatgagggatgatggaaaacagttttcctgcctttctcattctgttgttgagggagggtcttgagtgagaatctgctgttcctttcccggatagcctttccgtatttcacgatttgccgccgtggaaaagaagttcaagttctggacaaaagaaaaaaaagaaatgtaaatagaatgtgaataacaggtgtataaatgaaatggaatatctgtaaaaaagttatggaataatcataaaataaatgaattggataaatcttgaccaggcttgcagaaaagcctggtgccgtttccggttcaatgccggagaaattacccgtgccgagcactaaggccccattattccttttcgttacatatcttattgagcagcacaagaaattgccgcacggcaagcaggcgtttaagtaaccggaatgaagacggatttctaatccgtggtcacataagccctgtaaggttcctaccttcggaagggaaaggatttcttctccggggagcgaaaacatcccccgatggattcaaagaagaggacagtccatctgggaaacggaagcctaccggtttcgtatgaaacgtaaaatcccaagggagaggaaaaggaacattttccttctgttagggtacttttcaggagccgggaggcccttattcccaggactttcctcttctttatatcctggggggatggtagcgctccccggagaagaaaggcttctctgccgaaaaaccttacagggcttatgtgaccacggattagaaatccgctaaattggtttcagtgggtgttttggcatttttggtgtcaggccgctccaattaactacatgatatacgacgagaaaaaccggacttccctgacgtggggaggtccggttttttatcatgccaggggaagttatttccttttccggcaatggaaattcatgggaaacactccttttcctaatgataaattggtcatgtgccttgaaaaaatatagaggagcaggaaggggaggaaatggacaggcttctcaatcagccgctgccggaggctggggcttgtcttccggcaaaacgccgggaggcacgaacagtgccgtggacggaatgatgaccggagagggaatgtccggaccggaccaggcaacggacatatggtccggacctccgtcctccttgtgaatcaccaccagaaaataaaatctgcccgcttccagttgaacgggttcggaagcctggttgggctggttgctccaattatggggatctgaataccccttcaccgtagcaatgcaggccatatccttctgggtggcgtccttgccaagccacagctccgcggaatcgtcggaagacagataaagacggtacttgccgctgacgggtacccggagcagggcggaataacgggctccgtactggtcgcccagattagttacatccaggctgcttatcctgtgaacggctgatgccgctgtttcaaaaaccttcccgtgcgttaaatctcttactgagcttcccggaataccgaaccataactcctgcgctacgcccggggaaggctccccggcatcggacgggccggaagcggcttccgtcagcaaggcgccgcacagaaggctcaggatgggtaaaaaaacgttcatggatgaatggggcagagggatactctctgcaacgactacggacaggataggggcaacctttcaaaaacggcgtcattcccggggttcggtgtcatccgggggctctcctgctcctggctgccgtccttctggcggcgggaaccgcttctccagatcatccagccgatcaggaatgccagaacgcccagtccggcgaccctccggggagtggaaatgccgctgtcttccgtttgggccggttgccccgtgtttgcgggaggctcctgggcatgcagggaaccggccaggaaaaaagccgccagagcggcggcggaaagcatgcgatgctgaaaaaggaggcgtttcatcgtttatgaaaaggtaaaataggagtgaaccttattcaaacacatttgttccggctgttcctgtttccgggcatgcgcggcttggaacttcttcccggtccggtatttcccggaaaaaatcgtccatggtcatcttttttgcagaaaaagcttgcgtgtctgctgctgtcatgatactttttccccgtcctcaacgggacgcaccaagacgaaagtcaaggggtattagctcagttggtagagcgcctcaatggcattgaggaggtcagcggttcgaacccgctatgctccaccaaataaaggccttaaagcatgaacgctttaaggccttttccgttttatcaaccgcattgaaagtctggcggtcagtgtttggtggaaggaagagaagtggaacaaaagatatcatttcaacatttgttgtttgaggagacaatcttgttccatttcttgtatgaacgtatgatattaagaaaataaaaaacaggtttgaaacgttgattctgttttgttgtcctttacttattggcgcggagctggtcaatcagtgcctttcggtcttggtatgcctgcgaaggaattgttagcttgccataatgatcgtctgcttttttccaagccgcttcccacatagcatcagataacgcaggcagagcggaatctggaagcaattcttccgaataagccgtgaattccagttcatccggggtctttgttctgaattcccctttgattaattgtgttacatgcatcctttcatgacgcagggtggaaatgcacttggcaaaaacttcctcctcgttagtagggcttgtcagtatacgacgcaaatatgcaggtttgaacgtgatgcagggagagctttccgttcctcccgttttggcatgcgcgtggtctcctccaaaatctttcactttgagttggtaggttttgtccccttgaaaataggtattgttcagaaagttgatagcttcatcattttgattattagtgaggtatgttttaaatgtatccagattgctcatgataattggttagtgttgaccaggaatgggaggcggttgattctgccatgggaacgctcagcctacagattccggtaatgttgttcctactcttttattagttggcttttcggattctgccatgttgtctgtcgacaccacgactttatctttgttcaggtctcgtccaagtttacccgtttcgaacggcattctcctttttttaaaataacggcgaacttttcaaaagatggatgcatcgcaagaataacgtcatggaaataaacgattccatcactcttagaggcagaaacagttctctcgtacatgatgacgttgcaaaaatgccgctagggtggggcgacatggacaatgatgcatcatcatttgcttgttgggccaaccattttatcaagatatattttaatcgtgatgttggggttaagtgtacttttcccaagtacaaatatcgcccggaaccacttgaaaaaggggatgggggagaatggatgtggtttgttgtagcagggaatattgctgaggggaccttttccggagtttgttcagtagatgatggaattcgtattcgagctgtttatccgggagaaggaggcgggaagagggctggcacgcacaaggagaaattttgcttaaatcaaagctgtagcctctgcgaatggattcttcatggacggctttcaggtagaggtccatggtttgtaggggatttcccgtttcccggaaacggatgagctggggatggcgggtgtagccttttgtttgtcccagcaggactttccgggcgagcaagccttccctccacagggcaatcaggccgatggcatccagataggaagggtggagtgaccaaagtctcatggttttttggactgtgaaaggtcacacaacgttgattctccctgtgcagcacacgaaaggctgcagaggagggtatggatttcaggctgttctgtgagaaagccgccgtttcagttcaagagatttttccagaattctttagttgcaggcaatggctattgagaaatgcgcggaaccctgaacttcctgaaaatgcctgttctttgttatggtcaagggagacgttttgtcatccctgggctgtcaatggttccgtgtccatgaaggtttttccggacggcagaggataaattttctttgttccacgggcagacaaacgctttatggcaaacaagctgcatcactggctcatgcctcattccggaagggagaacgggaaaatgctccgtgattcctgtttggaatgctttttcatcagccgtgccagggttggctgaatggcttccgccatgaggcgctgcccttccgtgttggggtgcagggggccggcttttttcccgttgatgacgacgactgacgggtcacagaataattcctcccgcaccttgccgtttccatccagaaagacgtcgcgaatgtccagaaatgtaacaaacggatttttggcatagaggcgtgccagcctgtcattgacggccatatcccttttgaattttttatccgggtaggctgccgcggctacgtgccagttgtaaatgtcgctgggcagaatgccgaccaggagaatggaggcatgggggagtttggaatggactttgttcaccacgcggcagatgccgttgaaagtttcttcctccgtattgccgcgtcccgtgtcattggtgccgatcatgatctggaccactttgggggagacatggtccaggattcccttgcccccgattcttgccaggacgtcatccgtcgtattgccgttgaagcctgcattgaaggcattgtagggagcatagtattttttccagatgggcagaaagtcctggcagggaaggttgtccttacggtagttgtccgtgatggagtctccgatgaagacgtattccggcttgatgttccggtggcgttccttaacggcttcatggcgcgtttcccaggtgtaagcatggtcccggtgctaggcttccggtttcagggtgggcggcagggactccgctgcttccgatacagccggaatcaggagaaacaacaaacagagaaggagttttttcatggaaacggagctttcaacttgttttgtgtaaacaagagcgtcccggtttgcgcctttctatcttctttttccattccgcgccgttaacggtaaaaaacggtatcatgctccatggccgtgaattgctcaagttatcctgttttccccggaggaagaccgcccggagagtggaaaactgttggaaaaggagcggcggaaactgtctttctgccttacgcttgccggaaggcccgggaaatatatggcaggagagggcatgcgccaaggcttcacatccctgttgcaggtcttgtcaggccagggagatttctccctggatgtcctcggcctccggttccgggagcgcgggttcccggacgggggccgtttccgaggcgggggattgctccgttctggtgttgatggcttccagaatcagttccaccgtgcgttccaggccgtagtcggacgtgttgacgcacaagtcgtagaggcgggcgttgcccagctcctgcccggtatagtgcaggcagtgggtacggcggcgggaatccatgaggtccatggctttggctgctccgccaggcttcaccccgtagttttcagtgacgcgctgcatgcgcgtggcccggtccgcatgaaggaatacgctgaacaggttgggcctccctttcaggatgaaattggcgcagcgccccacaatgacgcaggcctgccgggccgtgatgtcccggataactttgctctgggccaggaaggtggcgtcttccggtggcagttcctccgccgtgtaagcgtagttctgcgcatagagttcatgcaggaagcggctggaaagctgctgttcgtgcttgcggatgtagtccggagtaaggccgctttgggaggcggtcaggtagaccagttccgagtcgtagaattgaaggcccagccgctccgcaatcattttgccgatggcatggccgccggagccgtattcccggtcaatggagatgaccaggggggcgtccggcgcgtaagcggctgtttgcgccagcggaaggacttctcctgcggctccggggcgtgccagccgttccagcagcctgtccggccagaagacgtgcctgttgaaaaaacggacgatcatgcccaccagaacggcggccaccatggttccttcccgtatgcccgtcaatccgggcaggaacatgaaggagcaggctaggccgatgcagacgagcgtgcagtccacactggttttaacggctccgaattcccatttgaagagtttgacgaaggccaggctcatgccttccgccgctagcagaacggcatccgccttgacttgcagaaagacgccgaatccaatgacggcgcagctgaacaggcagaggattacggaccagaggtatccggacggttccaggggagccatcagccacatggagaagtccgtcaaggcgccgaagataaagacgacgggaatctggagcagatgcgccggacggaattgccttttcagcagggccgcctgcacggcgacaaagctcagatgcatcaggatggtgacggttcccatcgtcagcgggagcgccaggctgagcacatacggcgtgcaggagatgggggagacgcccaggttagccttggcggacagggcgatgcccagggacatgatgaagagcgccacgatcaggacgaagcagcgcaggatgtgttctccaatgcttctccggacgtgatgatctgccatgataccggatgttagcttttctgtcagcgtcaagtcaagggttcagggagaatgaggcggttttttccttttccccctcctccgttgtttgccgttcctgaggttgcccgccataagcaggtgggtatagcctgatgaacggcctcatggctgcgccgtactttccagcagggaaggaaagagaaccggtcttgtaaaagggagccgttttatctatgctgcagggggattccggttcaagcttatgtccaaaaagaaggagaaggaggcgaagacgaacgccatgcgcctgctggatatgctgcatgtcccttacaggcattattcctatgggtgccgcgagtttgtggacgcgtggcatacggcgcaggctctggggctgccggcggaaaagatgtacaagacgctggtgacggagggcgcgccgcggcagtattacgtgttcgtgattcccatcggcgcggagctttccttgaagaaggcggcgcgtgccgtgggagccaaggctctttccatgcttcctgtgaaggatattaccaccgtaacggggtacgtgcgcggaggctgcaccgctctgggaatgaagaggaagtatcccgccgtgattgattccagcgcggaggctctgccggagatggtggtgagcggcggacgcctgggatgccagattgaattgagccctgtggatttatgccgtgcggcggagggctcttttgctgatgtggcggagattccctcctcgttgtgatttccattgtcccggaaatgcggacggaacgcggtaaaaagcttttcccggaggatttttttctatattcctgttgcggtccattcctccgttgccatgagtagccgttcccactcccgtacctgcctggccctttgccatgtggcttttgaagatcttggcacgctggagccccttttcaggagcaggggttttcaaatccggtacgtccaggcaggcgctccgtatccttccgttcaggagtggctgggggctgattgttgcgtagtgctgggcggtcccgtgggggtgggggatgtggaacggtatccctatctgaagacggagctggatttggtccgcatgcgtctggagcgtcaactgcctttgctgggcgtctgccttggcgctcaaatgatggcccatgccctcggcgcccgggtttatcccggtacggccagggaaatagggtgggggcgcatatccctgacggaggccgggcgcctgtctcctctccgccatttggagggaacacccgttctgcattggcatggggatacgtttgacgtgccttccggagcgcgtctgctggcgtctacggagattaccccgcatcaggccttttgcgcagggaagcatgcgctggctctccagtttcatgtggaggcggacgtttcccggatggaggagtggctgaccgggcatgcctgtgaattgatggccgccgggacggatatttgcgggctccgggcggcttccgtacgtaacggaaccctgctggccgggcgcgccgcgctttgcatgaatgaatggatggaggctgccggcttatgagaagaaaagacagggaagtaatccgtcacgcggatttgctggatatggtcgcccggttcaaggtgtgccgcctgggattgtgggacggcagggaggtgtacgtagtgcccctcaatttcggttatgaagaacgggatggttccctgaatctgtttttccactgcgcccgggaagggaggaagctggatatcctgcaaacccgcccggaggtctcttttgagatggacggggaccatgtgctgatggagggggataccccgtgccggtacagttatgcctacggctgcgtcatgggccggggcgtcgtcgagttcctgcgggaagatgaggaaaaaatccatgccttgagccgcatcatgctgcaccagacggggcgagaggcggcttttacccccggcatggtctgtgccgtatatgttctgcgtctcagggtggaatccatcagcggcaagcttcatgcgtgtccggaacctcctcctgcctgttgacggattttgtatgtctggagaaatcgcacccctgtttatccgctggagcctgccgcactgggcggccttgggcgtcgtggctctggccgcgggggggctcctgtggggctgccggaggctcaggatggaaaaacgcgtgctgatcgggaaggcgctgggcgccgtcttcctgctgactttcctgattgaaacgttcgggcgcattgttagggaacactgggagccctggcaggacaggcttccgctgcacttttgcagcctgatgacgctggtgtgctttatcgccctgtggtttcgcaagccctgggcgtgcgccgtggcgtatttcggcgtgctgacggcgagcgtccaggggctgattacccccatgctttacgacggctttccctccgccgcgttcttcgccttctttgtggggcacgggcttttattgatttccgccctttatcttcccgtcgtcttgggatggcgcgcgcgtccgtgggatgacgtgaaaacgctgggcttgtgcgacgcctacctgcttctgattattccggtgaacgtgtggctcggaacgaattacggttttacccggtatgctccggccgggaccgtgctggaatatttcggccccgctccgtggtatctgctgacgcttcagcttccggccctggccattctgcggctgctgtacctgactgtccgcatcagggaaaagtaggcagggcgtgggcacagcgtttccgcatatccggagccccatcggttcctatttcagcgttttcaggtcttccttcgtgaacaggtggatgtccttttcacgggcatggcgtatcttttccgcccattccgcatccgccagcagggcgcgccctacggcaatgaggtcgaactccccggctttcagccgttccaccagtggttccacactggcggcctccgcttccgggccgccgtcaaaggcattcgtaaaatcccccttgagtcccacggaaccgacggagatggagggctttccagtaagcttcttggtccagccggccaggttgaggcgggaaccttcaaactccggttcccagaaccggcgcgtggaacagtcaaaaatgtccacgcccgcttccgtcaggggtgtcagaaaatcttccagttccacgggggtgtgcgccagcttggcatcgtaatggccggttttccattgggagaagcggaagatgatggggaactggctgccgaccgccttgcgtacggcatggacaatgctgctggcaaaacgggtgcggcccaccaggtctccgccgtattcgtccgtgcgcctgttggtctccttccagaaaaactggtcgatcaggtagccgtgcgctccatgcagttccacaccgtcaaagcccagccgtttggcatccgccgcggcgcgcgcgaaagcgtcgatgacttcttcaatcttggcgatgctcatgggctccgccgtttgttccagcgtgttcacgtcaattccggatggtccgatgggaggcagttccggattgggcaggttctctcccttgaagggccgggccatgcccacgtgccaaagctggggggctattttgcaatccgtggtatgaacggcttccaacacctttttccatccccgcagggaggccccgccgaagaaattggggtaattggaggaaggggaggcgctgggttcgtcaataaaggtgccctccgtgatgatgagccctacttcatgttttgcccggctcttgtaataggcggccacctggtccgtaggaaccccgctgggagaaaatccccgggtcatggccgggagaacgatgcgggtgggagtgtcgagcttgcgtgaatgaaaaggctggaacagaatttccatgtccctgatcttgagttcgtcctgtgcgttcatgagaataaaaggcgttatatctgaagcggcccggatatgggccgggatgatacaggtatgagacactttccggcctcctcccgttcatccctgatgctggctgtggatcattgattcgtttgaggcaggactcccctcaaccgcatttgccggaagagacaggaaattccggagcagggacttcccgtccggcgtcaggatggattccggatgaaactggatgccgtaaagggggcgggacctgtggcgaatggcctggatgtttcccccggaatcccttgcggtgacgaccagttcctccggccagggagtggcggcaagacgccaggaatggtacaggcctgcggggaattcctccggcagcccctccagaagggggcagctctccgtccggcgtatgggttcacggaccccgtgaagcggctgggagagatgttccagccgggccccgaagcgtatgcccaggatctggtgccccaggcatacgcccagcaccggagtgcaggggggcaggcggtccagaaggcggaaggttgcctggtggcattcgtcctccaccgttccgggcccgggggacaggatgagtttttctgccgcctgaaccgcctgttccagttccggcgaaaggttggagaccacgcgcggaacggccattcccgtcactctgacgagttccgcgagattccaggtaaaggaatcccggtggtcgatgatccagacgttcggttgactcatggcgcgcacatgatagaataattcccgccaatgtacacacgggaagaaaccatcctccgcatgaatgccctgggccgtgcggaacgtccgttcttctttgtgatctcccatgatctggagcacaacctcctgtttgagcttccggaaacggggcacgaacgtatggcggctttttccctgccgctgggaggcatgggggagcagggcaactggccgccgcttccggaacggctgcggttcatcccttccccctgttccatggcccggtatgcggcgtccttcgcctccgtccggaaccatctgatgaggggggactcctacctgctgaatttatgcgtggcgacccccgtggaaaccaacctgacgctgcgccatctgttccggttcgcacgggctccctaccggatgctgctggggccggacgcccgtgttcccggcgtgcatggccgcagctgcgtctgcttctctccggaaccgtttgtcacggtacgcgggcggtccatttccacgtttccgatgaagggaacggctcctgccgccacgccggaagcccgcgactggctggagacggatgaaaaggaaaaccgggaatccgccaccattgtggacctgatgcgcaatgatctctccatggtggcggcagatgtgcaagtcaggcgctaccgctacatcagcccggtaaaaacgcgcggaagaaccatcctgcaatgcagttccgagatttcaggccgcctgccggaagactggcgttcccgcctgggggaaatcctgctgaagctgctgcccgccgggagtgtgaccggagcgcccaaggaggccacctgccgggccattgcggaggcggaggacatggagcgggggttttacaccgggattttcggtttcttcaacgggcgggatttggattccgccgtcgccatccgcttcatggaagaggatgaaaagggaatggtgtacaaaagcggaggcggcatcaccgtcatgagccgcatggaagatgaataccgggaagctattgccaaagtttatgtgccgtttgatttttgaaaccgtcaaatgggaggatggcgctccctgcctgctcccctggcatcagcggagggtggaagccgccatgaaccttcacggagcggaaggctccgccgttcccgatctggcctccgtgctggcggcctgtccggggccggaaggccgcggcatttacaaatgccatatcacgtatgatacgcagggaaaggcgtgccgtcccgtctttgaaccttaccgtccccggctggtgaaaaggttggcatgcgtggaaattccacggctggattacttctgcaagtgggaggaccggacggagcttcaggcggcagggctggggttgggagaggatgaagaagtgctgatcctccggcacgggcaggtgacggatacgcggtacagcaacgtcgtgttcggggacggctcctcctgggtgactccggaaacttttctgcttcccggcaccaagcgcgcattcctgctggcatgcggagccattgaagagctttccatcaaagcggaggatataaaaaaattccgcttctgttccctgattaacgccatgctggaccccggcgacgtggtggtgcggacggaggatatcgtctatccttaaccggttttataaatttatatattacaggagcatgatctacaattcctgataataccgttgcatcagcttcgccatcagtttgcggcgttcttgaaggaatgattcgtaatcacttatatccatgctgacaatattttgagggatactgttttcctccagattgcggtaaagcatttcttcgtcggaaatatttccgagtgtaatggctttagtcccgcattgctcttgtactttggcaaaatagacagagggaggatcgtctccaatggctttatttacctgcgtatcaagatagatataattggctacctgattatattttgtcttattatcaatgccgttctttttcagataattgcgcggaaaaatatggtgcacgtctcctgaaatggtaatgagatcggagactttagtccctttcatcagcagggaattgcagttcaggttaatttgagcagcaaggaaggtattgaaggcgggactgtttacagaagacgtttccaggttctgaggcagcgtaaccgtccaaaatgtttccgatagggcagaggcctccacttctgttttgaaattcaggaagcctttttcttcgatattgcgcatatcacggtccatctgcgtctccggagatccgatgtatcttgaagttagggtggagaggacgaaccatttttgaacatgccgtttgatttgttcgtttggaatggttggatcactccgcagcatcagatacaaagtgtaagcaaaatccaacgtcatttgtgaattcaactgtttgctggagacaaagcccgcacccttaagggccattacaaattgtgtaaaattgtgctggttgataaattgtacaatgccggcatccagtttccggtaggattccgctacgatatcatcccggtattccttggtttcgaaatccctcccggacaataagctgaccaaatcagcaagttttcctctgcggaactggtgcatgaatgatacccgtagcatatcgccgtaatcgggatcgtaaatgtcatcataatcatgagccagccacttgattttatccgcatacttggaattctggaattcctcatcacgtaccaataaggagtaaaaatcaggtttcacggccagatggcagaaatagtccactgttttacgcatcatactgccttcatgttccatgtccgcggccatcttggacatgacaaagtctgattggctgagagacgttcctttggaattgatacgaatgaaaatttcagttacttcatcaatatccaatgtagcatccagctcaatcacgccaatttgcctgttggcgattccttttagagaggcaatggatttattgattatgttgggtttgattccttcattgatggtacaatattcaacggagaactcgaacgcatcgaaatcggcatcaaatacgatggaaatatccggtatccatcgtttgtcttttaaatgagaagcgtcttgaaccgcaaaacgcttgctcggatcatcagcaagaggattgaaggcgattttgacgcggtctttattaaaatcttcatccaggacttctttgccggcgatagcggccatcagggcggttacacgttgctgtccgtcgataagtactttttttccgttggcttttcctccatccttggttttcacgtcaggattcttccaagtaatgatatagcccgtagggtagccgttatataaggaatcaattaaatcccgtacttggcttcgtttccagacaaaggggcgctgaatttctggtataacgaaatcttccgcttctatcagccccaagacggcgctgacggaatattgcatcaacgtgaatttttcaccggtcatgatatttctcttttattgcttcatccactattgagcttatttagcatgaggagtgcttttcatggatattagaagttgggttcacgcttgaaatatatgatttcatgaaaaaagatgtgcagatcttttcccagcatgttagcggcatcataaaacaccgcagaaggaggagcaattgtttttgatcctctgaaaataaaaacagactggatttttttggaatgccttttcagcagagatttcctattatcttcattttaaagatagataaaaagtaaaagccgtttgtcatatttggcaaacggcttttagtaagagtaatatgttttgtttttccttaaatggcgccgcagtagtgggcgcagaaccacatggcgcggggatggtggaagaaggacttccagaggctgcccttgagggtgtttgccctggagccgtccttgttcaggtagccgaaccagtcgccgtgctgcacgtcctggaagtgggagaaggcccagttgtgcaccatgtcgtggcagatggcgtagcgttcctctccagtgagcttgtaggcgagcgtcatggcaatgagcgcctcgtcgtgcggccaccagaatttcatgttgtgccagtattcctggacgggcttgccgtacacgtccgtaaagtagagcaggccgccgttttccttgtcccacccgcgcgcgaaagcccagtcgatcatgtcgcagcccaccttgatgagttccggatcattgccgcggaagcgggcttcctccagcacgaaccagcccccctcaatggtatggccgggattgagcgtgcgttcgtcaaagtggtcgatgatggcgccgtcagggctcaccacttccatcacggccttgagctccggcttcatgaacagggtgcggaggtcgttgatgcagcggtcgatccatccggtgtagaagccgtcctcgtcacccaggtacttgcgcagttcctgggcggtcgccagcgtaatcatgcgtgttcccagtcccgtcgtgggacggttcccggtgaatttgggaaccatcttgccgggggtgaagcagatgtccgtaaagacgtcgaaccagtggcgcgcggcttttgcggattcttcatttcctgcagctttcgcatgggcggcaaaggcgatggcggcaaaggattcgctgtacgcatagcggcgcttgcggatgggggtgccgtccgcctccacatggaagtacatgcggccgtcggcagggtccacgcatttcgccgtcaggaagttcagggcgctttccgcccatttgagccagtccgggtttttctcaatgctgttgtacatggtcagcagcatccaggccatgcggccctgggcccacacggatttgtccgtgtccaccagggtgccgtccgcgtcaaagcagtggtagaggcccccgttcttttcgtcgtaagcgcgcgggaaccagaacggcagaacgtcttccagaagctggcggcggtagaatgcgcccagggtggtcaggtcaagtgttgcagccataagagggaaagcggtttagttcatggaccactggaagaagccgatggcttccagctcggagcggagttccttgagctgttccgcggtggggttgccctgcggcaggcgggcgggacccaggtcaacgcccagccagcccatcagggccttggcgcagcccatgtagcccttggaggccaggatgttgatcatctgcacggatttccactggcagtcgcgcgccgtttccacgtcgccttctgcaaaggatttcatgagtttctggtacagggccggggcaaagttgaaggagcttcccacagcgcccttggcgcctacggagagggctcccgtgaaccattcgtccacgccccaggggatgtccacgttttcgtcgtagttcaacgtggtctggtacagggccaggtccggattggtgaatttgatgcccgcaaagttcgggatctgttccttggccagcttgatgaagtctaccggattgaaacgcacgcccgtcagcacgggaatgtcgtagtagtaatagggcaggtcgggagcgccggaagcggcgaaggcgcagcattccaccagacgctggacagtgcctggcttgtagtaggagggggcaagggagctggtcgccacgaatccgcattcctgggcaaaggcggccagttcgcgggcgtcccagacgctgttggaaccggtatgggcgatgacgtccacgccgtacttggcggaagcttccttccaggcggagtagatttcctttcgttcttcaagctgcatggaggaggattcaccagtgcttccggtaatgaaagccagcttgatgccctgggaggcaagcagcctggcctgggcgtcaacgctggaaggattcagggaaccgtccgccttgaacggagtgtgtacggcggccaccaggccgtggagtttcaatgacgtgttcatattgtgtagtgatatgaaaataattcggggaaatgattacaaatcatcttgggaaagacaacccctgaatccttttgaatcaaaaaagaccacataaaaaaacgcgcgttctccaaaaaagaatgcgcgccggagcaagagatgcttcaaaacattagcggacagcctgttgcttgatgatggaatacatggcttttgccagggatttcgcgtgcgtcagcagcaaatctccatcataacaccagatcatcacgccgcccagcttctgggtttttacgtactggcattttttcttaatcgtggtgatgccgttaaagtagtgctgctggccgtcgatggcgcagaggtccgtgccgggggcgatgttggggtagagctggacgacgttggaatagcctttctgggcgtcccagttgcggttggagcgcgtctcgttggtgtagaacggcaggccgacgacgattttgcagtccggaatgtttttcctgcggatggtttggatgtcgatgagcatgtccggataggtggagtgctgtccggcgcggtcatagctcatgacgttgacgaagtccagcaggtccatcatttcactggtgggcgccaggtagtacggattgatcgccgcgctcagggacatgccgctggctcccatggcggagcgcacttctcccagcagcaggcagaagttgtaccactccgtgccgttgtccgggtattcccagtcaatgtctattccgtcaaatcccttttccctggcgaaggaaacgagctggtacgcgaactgccgccttttttccgcatttcccgtgaaagccgtcaaccctccgtcacagtgggccacgcccagaatgatcttgctgcccgccgttccgcgaaggtttttaagcttgtccaggccattcaggaactgggcgttgttctgccccgtcaggtttccttccgtgtcacatcccacgttgaagtaaatgaggtccgtgaatgatttgaagtgctgggcggtcaggtggttggggttccactgcatcaggttggtgttgcggtagtagggcaccacgcggaattggtagggatacacctccgcgcagccttccggggaaggattggcgaccgctacattggagtcctccagcagggccacgcccgtgcaggaggcgtccaccttgttcaaccctcgcgcgcgggggttgaggtccacgcacagccagaagtagttgtctcctgcggagagcgcgtggcttccctcgaattggaaggttttggcccccttggagatggtgttgaggacggggatggccctccggttggcctgctccgcgttcggggagaagtagggagtggcgccggagtagaaaatccgggccttcgcgatgtcggagacggaggtggttccggccatggagaaggtcattcccttcaggatctggctggtttccgtaacggtcaccttgatcttcatgatggcctggctgtccgcgcccgcataaaggatggagtgcgtttgttcacaggctgctgtggcggaagccgcgtacaggggggcagcgccggacaggcccagggccagggcgcacatgcaggttttaaaggtactgttcatgttttattaagagatggcggttgttagatagtgcgcttcctgacggcgagcaggccgcctgccgccaggagaagcagaagggaggtagcgggttccgggactaccaggccattggaaatccagtccagatggagggcgtttccttcgtcccagcgcagttcccagcgccccagttccagagaggggtcatagccttccagccccagattccccaccgtgatggtagcggagtcggagagggaggagaggatttcagagaaagtcccgtccatgttcgtgacgccggatgcatccatgaccaggtaggactggtccctctgccagatggaggaggtgtagtccacttggtcgtcgcccagggccagcgtccctcccagcgtcagggtgtccgcatgcagttccaggctgatcatggagccgcgggagaggtcaatcgtgattccgttggaaatatcaatggcattggcagtgatggagaagctgccttcgcccgttccgaggatggagacgttgtttcccagcgtcagcgtgtctgcattcaggctgccggttcccatgacggacagctccgttccgtcctccagcctcacgtccgccgcattcagggcggcctgttcgccaatgtggaggcttcctccgcttacggtgaaggaggttcgcgcttcttccgtgctccagtctgcggaatggtagccgtaggttgccccgctgctgacggaaaaggtgcctccgtacacggtcgtattggcccggatgccggactggctgtttgcgccggacatggcgaccgtgcctccggccccggcggcgtcattgacgctgatgtccacgacggattcgtcctgggagctgaggccgtcttcaaagaggatccggcggttgttcgccgcattgaaggaagccatggcgccgtcgttgaaatggatagcgttgtaaacgcttccgtcctggactgtgtttccgcggaagatgatgtccgcctggtccgccgtcagggaaatggagcctcctccctgcaggttgatggcgcctccggcgttttccgcactgttgttttcaaacagcaccgtcccggtgttgccggaaatggcaacgttgtaggcgtccagggctcccccttcataagctgtgttgccggagaaggaggcggcgccggaatcggagatggtgatgtccccgtaggctccgatggcgcccccgtaggtggatgcgtggttgtcggagaaggtcagggcccccactccggagaaggtgacgtttccatccgaatagatggcgcccccgccgccgtcccgggcctcgttgcccgtcatgctgaaggaggcggcggtattggccgttacgtccccgccggaccagatggcgcctcccgcgcccgcctccgccaggttgccggagaaggccacgtggcccacgctggaccattccacggtttcataatcgttattgatggcgccgccgttttctccggccgtatttccggtgaaggagatgttttccgcgatgtcggagaaggtgaggctgcccgtggtgcctcccgtatggatggcgcccccgtgggtcatggcggagttgccggagaagctgatggcgcccgtgctggtgaaggaggctcctccggaggcgtaaatggctccgccggaagcgccggaatccgcgctcacgctgttgttgctgaacgtaagggctccggtgttgctgaaggcgaccgtatcattggcggcaatggcccccgcgccgtaaagggcctctgtattggacatgtcggcggcattattggagaaggtcaggctgccgatgtcctggaaggtgacgttttccgagagaatgacggcccacttggctccgtagttgtcaatgttgattccgtggccgcccgtgaaggtgatgctctggagggtgttgttatacccgcggccgcctgtccagcagttgacgtttgctcccagggctcccagattctggtccgccgtgagcgtaaaaacggtatccgtatccgtcagcacgcttcccgcccaggccttggagcccagttccagggcggcgcgggtcatgatgttgagcgtgcccttgttgttttccgtgttcaggaggatgccgccttcatgccagttgaccatgctggcataggagctgccgcccatgtccagagtggctccgtcctggacgtcaatgacattggcaagagtgtggccgttcatggagaacagggctccggaagcgatgcttacattgcccagattgctgccggcgccgaaggcgttgtccacctccagcgtcagcttgcccgcatccacgcggaccgtgcggccggaggaaatcgtattggccctctggatgaccagctctccggcgccggatttaatgaggctcaggccggagaagttggcggtggtggggtctccgtattcgccggacgtgtttttattggcaaagacctggttgaagtagagtacggaattttctccgatggcgagcgccagcgcactgccggctccggtttcgcagacaatggcatcctggttctgcgcattggaggaagtccatgtaagggtctggttggctcccagttcaatggtggccgtcgtgccccagccggcgatgtaaatgccgcggctggccgtgcctccggattcatagccctgggaaatgacgatgcggctggaggttccggaagcgaatttaagggcgtaaaaattgttgtgcagcttgcccagggaggcggagtcatacccgaactggttcagtttgagcgttcctccgttcagcgtaatggtgggggactggaaattggctgtataaacgccgttatgaaacaagcggccattgctggcatccagcacggctccggaggcaatgttgatttttccgttaatccggttgttgtcactggcggtgatgtttctttccccggtgaaaaccagggtgcccgcgttgatgttccagacgccgctggccgtatgcgctccatccagggtaaccgttccggcgcctgtcttggcgagcgtggcggagccggtgaggctggtatcccggacttcataggagtcttccgcattgggggcgtccagaatcagcccggtattggaaagagtggcggaacctccgttgttcccggcagccgcgcccgtcagggtaagggaacctccgttcagcgtgatggccgcaccgttgtaaagcattccggacgcagagattccgcttcctactgtgatggaggaatccgtctggaattgggccgtatttccattgctccagtcggcggaggaatcatccagccgccacgctccggaatccgtccaggagccgtttcctccattccagaggtagtccgccgcatgggccgggatgcaggagagacagccggcgaacacgccgaagaacagtgcggtaattttcatgtaggttctaacagatagagtgatagtgaataaaaaagggaaaacaagaacgaacttgttttcccttaaaaaaaatcaggggacttaaccccggcggcggcgcatgcacgatagggaaaccagccccagcaggctcagtgtggccgtggcgggttccggaacgggaagggcggggttggccgccagcgcggctatttccccgtcattcaggacaccggcatataattggaggtcatccatggtcgtattggcggtggacgccagcttgagtgactgcacgtctccggtgaaattgactccggaggccgtgattttcttctgcccgtccagataaatgttcaattccccgttctggaaggtgatgatgatgttggaaaaggaatccctggaaatcgtcaggttggcccagttgcccacgtttccgccgcaataggccgcccatgccccggcggtggaggcgtcgccggaatccttctggaggtacatgttctggctgttgccggatgtgaaggtcagaatgcttttccatatagccgaggacgatgtattgccgggggagtagtccttgacggcaatggaaaggctgaaaccttccgtagcattcagccccagtcccgtactggaggagcccagcgtcaattgtccgccgttcgtgcggctgtcatagccccggccttcatagccatcggtataattcatccagcctgatccgctgaacgtggcgctgcccgcatttgggccggccaagttattatcatttaaagatgacaggtttccgtcaagcttgttgaaatcataaaaatatttcaatgtggcggcctgggctcccaaccctgagcaaagcaggaacatcgtaagatacagagaggatttcatgaaattattaaaaaaattactgaatggagccagtatcggatttacaatccggaagaccgcttcaaattcaataacttcttataaataaataaggtttccgtattaggcgttgtttattattcctactttatatgtgggaatatttgccgttacttttttgaactcaaaaaaaaaagttgacttccggattgtaaatccgcggcggaattattctgttatgcatgattaacttatgaaaaataaagcaatcatggttgaatcaggtatagatcaaaataccgcgaaatctcccgtcttttaatagaaatgcgtgaatgcctattgcccctggagggcggagattcatctggaaagaaatggccgttccaggcagcggaacgggtttccttcaattctttccatgcagggaaggaacgggagccttcgccgggagggtgtatagtttttcaatatcgtccagataccgggaaatgggggtattggcaggctgttcctgttcacggagcagtttgacggctgccgcgtaggaggcgaatgtcttgccggttccggaccgcgtattgatttcataccagtccatgtagtcccggacgcgccgggcggttttcatggatagctccctgatttcccgaagctgcctgattttcggggcggcttcccggccgttgatttttccggtctgcatcagggccacaagcttggcgtattccacaatgacgggccggtaggcggggaaggagcgccggctgaggttgagcaggctgccggatatgttggaaagctgcctgttcaggtccgtcagggaattggcctggtccagattgtccagggggaaggtgacggtcgtccgggtgtccggatcgtatttgaccagggtgagggcttcctgcaggtgacgttccgtttccgtgatcgtgagggtttccgtcaggggaggagtcgccatgcgggaaagctggagcgtccaccatttatgaagggaggagggggtcaggttgagctgcggaaaatggcgcttgatgagattcctgggatcgtcattgcccagaatggcctggtccagaagctgtttcatcccttccggaccgttttcctggttcagcaggctgagcaccagcgcgccgcaggaggtttgataggcggcgtaggaggtggcgtccagttccttttccggttccgggcagttcaggatttcttccggggtcatgatgccggattgctggaacagggtggagtacatggcccggtccgcttcattggtgtgccacaggacggcctgctccagcccggcaatcagccaggggggcagcgttacttcgtccggcagtccttccgggtccaccgtgcgcagcatcatctcataaagcagggtggagacgatggcgtggcgcagcctgtcctggttgatgccgcgtcccaggtgaatgaagatgttgtaggagagggtattccccacaatcacggtctgcatgcggatggggttggccggaaccgggcttcccggctcccctaccagacggatgatgatgttgtttttccattcgtcaggctgcttgaggattttcaccagggccgtgcgtatggagtccgcccgcgtggcaatggccccggccaacagggaatccatccctgtaacgtgaaattgcttggaagcggaaacgctggtgaacggctgccgtttgacggactgtccttccgttccggcaggggccgcggccggatgctggggagcggggggtacggcgctcacgttggagctgccctgcaataccggacggtcagaagcgtcatcgatcagggcggtgtccggaacgggaacgggggaagcggcctgcgcttccgcggaaggggcgttccctgcctccttctgttcctgcgcccgaacgcaggggggcaggagaagggccagcagcagaagggcgcatgttcctctgaatttcatcaatgggaaaagcttagtcgaattgttccgccagacagccgaagtcttcttccgcgtgcccttcacggcacagtttccccatgatggaggagaccagcgcggcagcgggcgggtggattcccttttcagcggccagttcctgggcgtagatgctgtctttccgcatattgtccagggagaagtgggtggaaaagtcgcgttccgccatcaggggcagcttgaaggacgccaggggggaggcgatgacgttccgggaaatggcctgccccagcagttgaggggaaatgccgtatgcctgggtgatggccagggcttcgctcaggctctgcaccatggtggcggagaccatgttggtgaccagtttgacgacggttccggcccctatcccccccaggtgcaggatgtcacgggaactgtgttccagtactggccgcacgcggtccagggtggaggagtccgttcccgcataatagaccagctcccctttttccgccggcaggcgggatccggtgaacggacagtccacatacgtgcagccgatggcggagcacatcagggagagcttgccgacggtggccaggtcaatcgtggagtggttcaggatgacatgttccggggtcagcgcgcccctcatctgttcaaatacttccagacaggcattcctgtctttcagatagagctggatgattttggaggcgcgggccgcgtccgccggggagggaacggcttccggaaagtcttcccggggcgtccggttccagacggtgaccttgtcacccagtccggtcatgtggcgtgcaatccgtgagccgatgaggcccagtcctaaaatggagacttgatacatggcgtttttcaggagaaaaaggaaggggcggatccgtcaggaaccgatgcggaagcggcttctcctgcggggtgcttcctgtttttccggcttgggcggttccgctgcggcggtggcggtttccgcaggaggctgtgcggcaggcgccgcggaggccgtttccctcatctggtccgccagggagacgggcccggcttccggacggtggctgaccacgacctgcttgggcccggcagagggcctttccagggcattggggtcctccgccacatgggcgggcacctcataggcatcgtggggaatggcggatggatcgcttactgctgcggccaggcgcatttcatcctcgttcgcggcaggcgagggagctttgtccggagcctgttttttgcggggaagggtggtggtcccggtgatggcgagttccaggtcggaatccggcaggccgccgctgcggatggcggcgtcataactcttgcgtgcctgcgccgtacggcccagccgggaataggtccaggccaggttgaagtgggcgtccggtgattccggctggattttcaaggcgttttcaaagtggcccaccgctttttcatagttgcctgcgctggtttccaggttgcccaggtaaagcagggccggagcgttggccgggtccagccggaccgtttccgtcagggaggcgatggcgtgctggtcctgcccggcgcggtactgggccacgcccatcatgaaccatgcgggggaggaggctgcatccagttccgtggcctttttcaggtattcgatggcttcctccgccttgttgcgctggagcaggatggtgcccaggttgaccagggccggaacgtgggccggctggaagtccagcagggtgcggtacaattgttccgcagcggcgtagcgttttttggcgaaggcctccgcggctccctgtcccagggcttccgcttccagcttccggcgcaccgtggcttccatactcctgttcagagctttttcctgctccggcgtaatggctccggcggaaatggcggccaggcgcgcctgttcggcggaacgggctttcagttcatccatctgccgggttagctcctccacttgaaggtttttctgttccagggccttctgggtccgggccagggcttccgcatggctcttgtcattcctggcggatttggccgcttttgtcttcgtctggctgcgcgccagttccagttccctggcaagctgggcggccttgtcgcgttccgcggaaagggcctgggccagcttgttgatcttttccttctgctggtccgtcagggggatgtttatcttgttgtctctggcgatgacgttgacaatctgcttttccgccggggtgagcttgatggcttcttcattgtccatcagggaggcgatttccgaagtgtccgcgttttcctggagcaggcgcttgtaagtgctgatgagcagggaacggctctggtcctgcacggaaaggatgcggagctgcttggcgattgtggagcgcagcaactggttttcctccagcaggagagggcttttttccggattggcttccagcttggacagctccacatccgcattgatgagcttggtattcagctccgtaatgcgcttgcggtagccgatgttttcatcccggatggcaatcagtttctgcttcaggtccgcggattcctcccgcgcctcttccagggctttcaggttggccttccgctgttcttcggagtcggacttggccgtttccagggcggcgattttatcctgagcgtccttgagctgggccgccagcgtcaggttgcggtccagcaggtttttggttttgtccgggctgttgagttccaccagggcggccaactggtcgcggtctttctggagggcgtttttctcatccgtgaccttggccagcttgtcctggtgctccttgagctgaatttggagatcggcaatctgcgccagatactggactttttcctgttccagcgtggtgactttctgttccagctcctccacccgcttggtgagggtctggaggagcttgttgctggtctttctctcatcctccatctgcttcttgaccttgagcagttcgtcccggtaaacggattctccggcggacgctatggccagttttgccagaatgtcctcctgttccttgcgggtgcgcttgagcgcctggatcagggccttgttttcaatggtggttttgtccagcagcctgcggatgcgctcgtaattgctttccaccacttccggggccgctccgggggaaacggacggggacgggatggtgttgacgagggattctccggggcgggaaggaaactccactcccttgtagcccggaggaaggacgatgttgggcttgggcctgggtcgcttgggcacggcggccggacgttccaattccaggccggggtctgatgaaacggcggcggcctgctgctgcgccagcttctgccactggtccagcttctccctgttgagctggcggcgtgtttgaagaaggttgggccgccattgcggataggccttcaccaggcgtcccaacttttcttccgcctgttgcgtcaggcggatggctcctatgtagtcgcgtttttccaccagttcggcagacctggttaccagctttaacgcttccaggtacatgtccgtggggtcctgccttgtcccggcggaaacgggcatgggacccggcacataggtgccctgggccagaaggggcagggcgccgcaggtcagggataaggcaacggcaatgccaagaggtagaggagtcatcatggggagaagctttgtttacatactgtaaaccatcttgaatcgcaaggataaaccgtgtcttgtgcttgtgttcgcggggcccggtgctagactctcctcaatccttgatttttctgatgaatatctccgttttagaccgttttttaaagtatgtttccgtgggttcccagtctgatgcggattcccgcagcgttccgtccactcccggtcagacggaactggcccggctgctggccggggagctgaaggcgctgggagcccaggcggagctggatgaagcctccggcatcgtgtacgcctccatcccgtccaacgtggagagggaggttcccgtcatcggctgggtggctcatgtggacacggccccgggcgtctccggcagcggcgtgaagccccgcatcgtgcgctcctacgacggcggagacatcgtcctgaaccgggaacagggcatcgtgctttcccccgccgttttccccgaactggcggactatgcgggccaggacctggtcgtgacggacggaaccaccctgcttggcgcggacgacaaggccggagtggcggaaatcatggatatggccgcctccttcctgctgcatcccgaacggccccacggcgagatacgcatcgccttcacgccggacgaggaaataggccgtggggcggatgcctttgacgtggagcgcttcggcgcggacttcgcctatactgtggacggaggagccctgggggaaatcgaatatgaaaatttcaatgcggcctctgccgtggcgacggtgcgcggcaccggcattcaccccggcagcgcgaagggcaggatgctgaacgcgtgcctggtcctcatggaattccagggaatgcttcccgcgttccagaatcccgcctttacggaaggatacgaaggcttctaccatttggactcgttccggggggatgtggaacgggcggtcggggagtacctcatcagggaccacgacacggcggaatttgagcgcaagaaggaattcatgcaggagtgcgccgccctgctgaaccggaagtacggggaaggaaccgtgcaggtggaggtaaaggactcctattacaacatgaaggaaaaaatcctcccgcacatgcacctggtggaacatgcccgcagggcgatggcggccgtgggcgtggagccggaaatcatcccggtgcgcggcggtacggatggagcccgtctttccttcatggggctgccgtgtcccaacctgtgcgccggaggccacaacttccacggaaggtatgaatacgttcctgtccgttccctggaaaaaatttccgccattctccaggaaatcgtttccggctacgcccggtacggtttggaacctcccgccggaaactagcggaacggcgatggagggcggctttgcggctccgtctcctgggagcggcaggctcctgcctttcgtgggtgaaaccatcgcgagccgccagggcagggaggctctggctcccagcgtggtgtgcggctgtgaaaagggaatggcgggaatgttaatcgggcgtctattgggggcctgtcagccatccctgaacattggaaaggacctcttttccggaccgtggaatcccgtgggattcctaatccgtgaagctgcgggaaagtgcttgcttttttccctcccgtcatgatcatggcggctcaccgtttttgataacccccgcatacacacattttgatatgagcgtgattcccaatgtcctggctgaaaggtacgcctccgccgccatgaaatccatctggtccgcagagggccgcatcgtcctggaacgcgaattctggatcgccgtgatgaaggcccagaaggatttggggctggatattccggacggcgtgattgaagcttacgaacgggtgaaggaccaggtgaaccttcccgccattgacgcccgcgaacgcgtcacgcgccacgacgtgaaggcgcgcattgaagagttctgcgagctggccggctgcgagcacatccacaagggcatgacctcccgcgacctgacggaaaacgtggaacagctccagatctggaagtccatgcagatcatccgggacaaggccgtggccgtgctgaaccgcatgagcgcccttgccggacaatggaagcacgtgaccatcgccggccgcacgcacaatgtagccgcgcagaccaccaccatgggcaagcgcgtcgccatgttcggggaagacatcgtgcacggcctgggttcctggatttccctgatggaccgctacagcgtgcgcgggctgaaaggcgccgtgggcacccagcttgaccagctctccctcttcgggcaggacgcgggccgcgtgctggagctggaagaccgcgtgtgcgcccacctgggcattccctccaagtggatgaacgtggggcaggtgtatccccgttccctggacttttccgtggtttccggcctggtggagctcacctccggctgttcctccttcgccaagaccctgcgcctgatggccggccatgaactggctacggaaggcttcgccaaggggcagaccggctccagcgccatgccgcacaagatgaacgcccgctcctgcgaacgtgtcaacggcttccacgtcatcctgaagggcttcctgatgatgatctccggactggccggggaccagtggaacgaaggggacgtatcctgctccgtggtgcgccgcgtagtcatgccggattccttctatgccgcggacggcctgtttgaaaccttcctgaccgtcctgaaccagatgggggtgtatgaagccgtggtggccgcggaactgcgccgctacctgcctttcctgatgactaccaccatcctgatggaagccgtcaagcgcggcattggccgggaaaccgcccatgaggtgatcaaggaacacgccgtggccgtctccaacgacctgagggccggaaaaatcatggaaaacaacctgctggaccgcctggcggaagacggtcgcctgggtattgaccgggcggacctccaggccatctttgactccaactcctccgccacgggcatggcggacgcccaggtggaagcgttccgctccatggtgcaggagctgacggacaggttcccgaacggcgcgggctaccagcccggagacatcctgtaagggcgccgtaccctccggtacgcactttattcccagacttcccagacgccgtccatccgggcggcgtccgtttttatgccggatgcgtacatgctttttcaatttctttacgtcaggagagcttgacgaatcagaaggatgccagtaagcttgaatccagtaaacgggcgcgtacgttgcatgcgccttcgcaagcaaccctcctgttaaacaattttcaatatggaaaaccagcagctcagccttttggaccgtgtgtacaccgttctcagaaagagaggggaagaaacggaatggattacttccgcggacaaccacaacctcagaacgggcatcgcgttcgtcccctgtgatacgttcacgcccgtgagcctcctgtacacgatgattgatcgtccggagacgctggtgattgacgtgctttttgccgccaaggtgcctgaaaaccgccgtgtggaagtcagcatcatcctcagtgagctgaatgcggaccagacggccggcgccttccagctggaccccaacagcggatacgtctactaccgccagtccttcgttctggaaggcatggacctcacggaagcccagtttgcccagttgatgaagaacattgaaaccgtggctgtggaaacggcggaagcctactcccacatcatggagacggaatatcccaaataacgggccgcgttccccccggagctgttcatgagcgaggcccctcaaaaaaagggaacatcctggtccataggcattggcctggggatcgcggcgcttttgataggaacggccattttaacggacccgtccgtctcgggctctgccggagaaaaggacaaggcggccgcaggaacggtggagccgctgcatttgcagacgaacactcttgccatttccgcgcccggcatcgtgaaggcctcccacctgacgatgctttcccccggcgtttccgggaaggtggacaaggtgcaccccctcttcagcgcgggggaaatcgtcctgaagggaacgcccctgctggagctggaaaaatttgaataccgtgcacgcctggcgaacgcgcaggctgggctggaacaggctcgcctggatgtatccacggaacaggcggaagccctgaaagccatcaagaagacgtacagctccgtctccaaaagcggaaaagagtcggaactggtgctccgggtgccgcagcgacgggccgtgaacgcgcggctgaacgccgcggaggcgtatgtggcggaagcggaacaggccctccgggacacggtgctggaagctccctatacctgccaggtggtggaatgctccgtgggagccggggcccgcgtggttgccgggcagccggtggggaaggtgattcccctccaggagcggatgatacgggttcccgtgccgctggaagaattttccgcattgcccagggatgaacagggcagggtaagcacggcgctgaccgcctcctgcgtgctgaacaatggaaaacggctgcaatggctgggccgcgttacggcggtggacgccgcactggataccgagcgcaattccgccgtgctgatagcctccctggagccgaacgcctcccatgtttccgaatggcaggtggcccccgtcaacatggcccttcaggtgaacatcagcgtgcaggtccctgcctccgcgtggattcccgcctctgccgtccgggatggaagctccattcaggtaaaaaccgcggaagggatgcaggagcgcaaggtgcgcgtggtggcgttgaaagacgggaaagccctggtaaccgttccggaattacgggacggggacgctttggctctttgatattccggatttcttcttcccctattttttccgagggcttgtccctttcaaaaggcgctccggaaatcaggctccggagaggccataaaaaaaccatgccgcccggaagggggaggcatggcgttgcgctcaatggccggcggcccatgggtcagtgtccgttcgttctcatgtcgaacaccagcacctcaaaaggttgaagttccaggctcaccggcttgccctgttccaaattcagcgttttgacgcgctggtccgggtaggaggccttcatggggaaaacggcgggcactcccttgacgggttcaaagacggttgacgcatccagatcaatcgtccgcggccggtcgtccggattgcggagggccagcgtgcagccccgcgggctccatgccgcatagccgtacggttccagctggttcgggttgccgcccacccagtgcacgtcggccaggacgtcctggaagcgccgggcccagcgggccccggccgccacgtcgtcccacgcctttttgtccatcatggacggcgtgagataaagttcctggagattggctccggaaccgaaataaatgcgggcgtcgttcttcaggtccctgttgtcctgcttcccgtcctctcccttgctgacgcgcgcggcctggaacttggtgcccagcaccatgccgtggtgcatgatggagttcaggggataaagcgggccgggcttgacgatgacgttatagcaggccccgtcgcggaacgtgatccactgttcgcggtcgtctcccttgcccgtccagcctacgtccgccgtaccgctgcgccaggtggaatccacatggttgagccagaagggggagggccaggtgcctaccgtcgtgttgatgaacaggcggggattctcccggcgaaggtcgttggcgatggaaagaagggccatgaaatgggggctgatgccgtctccggccttgtcccacttgaaataggtcaccttgtccttctgcatcaagtcggagcagcgttttttgaaccacttgtaatactgggggcaggaaaggtcgaatcccgcggcgtcagccgggagaatgcctttgtccttggcatgctgaaccctcttttccgggccgaaataccctcccagcggagaaatccagatgccgaagccggaaggaatcttcccgaccgccttgactacaggttcaaacccgtgcgggaattttttggtggagggctgccagaggtcttcattaacgtcgtcccagccgtcatccagcacgaagccgtccagcctgacgtggcgggaacccagttccttcctgtattccccggctgtcttgacgagcgtcttttccgtggggtccaggccgtcgtcataccagccgttgtaatgcagaaactgacggtagggcgcagcccgttcccgttccagataataaaggaacccgcggcgaagctggttctccggccatacgcccagcaccgtggtgaacgtctgggcgttaccgctgcccatgggaaggttgcagtcaaacccgacggttcccgttcctccggcggcctgggccctggctacgggaagttcaatgccggcaaacgtgccttcccgctcgctgaccagtgggctgcccggtacggtgcccttcacggccagggtgggatcctgcaaatcaatcaactggactttcttcaaatccacctccttggacgcttcaatccggtaggtttccttgacgtaggaggaaccctccctcaattccgccttccagtgaaccgtcagcccgctgtttttgtcccggaaaacggcggaaataacggccccttccagccgttcccccaggcggaggccggcggaatgccctttcaatgcgctgatggcgggaactccttccatcacaaaccgggaggaggggagattgtaggcgtccttctccgtggaaaggcggaacaattccggagcctgggcgccggtggcggccttttcgtccttggcaccccgctccttgttcacgattcccaggggaatcagcctgctgccgtccaccttccatgaggcgctcagaatattgttgcttaacgtataaacatccccttcccggtgggcggcgggggctcccggtgttgttcccggataggttacggacgcagcggctgtctgaaagcaaacgcaggaacaggcagccagggcaattgctggcagggatgatgagtgcataatccggaagaatccgcaatcgggaggcatccgtcaattcaaaaatacgggggacgggaggggcggtccgcgcccctggtccgccgcaaaatcctagtgggcttccagccagttattccccgttctggcttctaccagaatgggaacgccgttgggaaggggaagggcgccgatcatggcttcctcaatctttggaatgagctccgtctcgtccttgtggaggtccaccagcagctcgtcgtgaatttgcaggataaggcgggacctggtgccttccagtagcttgtccacatggatcatggctatcttgatcatatccgccgcggtgccctggatgggggtattgatggcggtgcgctccgcggcggacttgatggtcttgttggcggaattgatctccggaatcattctcctgcggcccagcagcgtttccgcgtaaccggcctgttccgccttgtgcaccaggtcctccatgaaggacttgaccacggggaactggatgaagtaattttcaatcagcgtggcggcctcactgcgggggcagcccagccgctgggaaaggccgaaggcggaaatgccgtaaatgatgccgaagttcaccgtcttggccgcacggcgcatgacggcgtccacctggtcgcggggaatgccgtacaccctggccgccgtctccgtatggatgtcccggccttcccggaaggcctcgcacatggcggggtctccggaaagcgccgccatgatgcgcagctcaatctgggaataatccgcggaaagcatggtgtactccccggaggcggggacgaaggccgtgcggatcaggcgcccctgttccgttcttaccggaatattctggagattggggtcctgggaagccagccgcccggtagcggtcagcatctggtggaactgggtgtggatgcggccgtcccgcgggcagatgtacctgggcagcgcgtccaggtacgtgctcttcagcttcatgttctcccggtaggccaggatatccgccacaatgggatgctggggagccagggcggagagggtatcttcatccgtcacgaactggcccgtcttcgtcttcttgggcttcttcaccagctccagctccccgaacaggaaatcgccgagctgcttgggggaattcaggttcaggggatggccggcggcctcttcaatcttctcccgcaggccgtcaataatggctcccaccttgacggaagcctcttccagggattccggaagcacgcggatgccggtgaactccatgtccgccagcacggggagaagaggcagttccaccgtgcggaacagctcctccatgccgctctccttcacctgctttttcaggatggcggaaagctggagggtaatatccgcatcctccgccgaatatttgcccatgacctccacgggaatgccgctggtatccagctcgcgcttcctggctcccggcgcggcaatgtccttcagcttgatggtggaatattgcagcaggttctccgccagaaggtccatgccgtgcttcatgccgggggcgatcagggcgtgcgccagcagcgtgtcaaaaaaggggcctttaacccgtatgccgttggcgcgcaaaacttccagatcaaacttcagatggtgcccggtcttctccgcagggccttccaaaagcggcctgaccgcttccaggtccgccggaccggagacaggcatgtaccatgccttgtgcggttccgcgcagaaggcgacgcccagcagcttgtccgtgaggggattcaggcctgtcgtctccgtgtcgaagcaccaggaatcatgcttttccagctcggcaaccatggcggaacgggcttcctccgtatccgcaatgatatactcgtgcttgaaatcatccaccgttttcagatggcgttcctcaaacaaatccatttggccggaaccgttctgccgcgcgtccgccgccggggcggcgggagcctccgccgggggctgttccgcctgggccggagcaaacaaatcgtccgcagggaggggggacttcctggcttccggcgcttttttcccgaacagcttggcctgcatggaacggaactcaagctcctgaaggagggccagcagctcttccggactggggtctcttttgaccagttcaggcagggtcacggtcaggggaacgtcccggtcaatggtggccagttgtttggaaagggtcgccatggctccgttttcctccacgatctgcctgcgctttcccttcagcttgtccgcattcgccagcaggttctccacggtgccgaactccccgattagcagtttggccgtcttttcacccacgccgggaagccccggaatattgtccgagctatcgcccatgagggccaggatgtcgatcacctggtccgcgcgttcaatgccccattgttccttgagcttttccaggtcaaccacctcgtggtcgttgccccgcttgccgggtttccacaaatagcaggtgggggaaatgagctggcccaggtccttgtcctgggaaaccatgtaggtctggaactccttcgtgccgtccgcgatgcgggccagcgtgcctatcgtatcgtccgcctcatacccctcatagcgcaggatgggaatgttcatggcctccagaagcctgaaaatcagaggcatctggtagctcaaatcttccggcatggactccctgttggccttataggcagggtaaagctcatggcgcgccgtgggggcggaagtatcaaagcaggccgcgatgtgcgtggggtgttcatgctccagaatgcccagcagcgtattggcgaagccgtacacggcggacgtgttgacgcccttggaattacggatggggttggagaaaaaggcaaaatgggctctataggccagagccattccatccagaataaaaaggcgcttggaaggggaatcagtcatttctgccctactttaccatgcggcccagcggtaggctaccgttaaatgcgcctccgcgccctctgccggatgaagcgccgcaagcccctggaggccattgaacggcacgcgtccgcagggacgtaacggatttcaggaaaaagtttgccgacgctcatttcaatactacgccgttgctgatcggcatttcccggaacaaaaggagtgcaagccgcctttccgtctggtatagaggcggaaacggagaggataaacatgcaggaattgttgacacgggaggaacgtgacagactggccgaacgcctgctgccgggagaaaaaattctgtggcagggaaaatcccgctgcggatggtggagaagggccgcgaaggaatggaagggaatgctgttttcggttttctttgccgcggcatggggctggggatgttgcatagcggcgtccgctccggtctggacgggtgaggtcatgtgcgcgctggcggtcatgggaatatgctgtttttttggtattgccctcctcggcatgcttttgatcaacgcggttttggaaacgcgccgggccaacgccgtcctgcacgccctgacgaatatgcgcctgttgtccctggggccgtccgcggacggcaacggcgtcctgttccggcagtggaacggggcggaactgcggaaaatccgccttgttgcccatcgagccgggccggaagatctggtattccgctaccggttcccgccaaacggaaaaccggagccgcaaggctggcccgcgcttcccggggcggaagcggtctgtgagcaaatcacgcgcctctttcccggcgtgtccgtatcacggctgccatgaactccgctagacggtcggcaggttcccgtgaaggcgccgccagcaggaagagaacctggccgtcgtaaacgaggcggcagacccagcagggagccggatattgctgcccccttcttcccctgcggcagatagtggcgcctgcatgcctcagccgttccagttcttccccgctcaacggtgtatgctcgtccacatgaagcacggagcattccgacaaaagctccggatcatagtcaaaagcatcccggcgcaggccgaacagccttttttccgcatgcacccagccgttcctggcttcataaatcctcttgccgaaccagatgtccagcagaaccgccaggattcccacgcttaaaaacggggcgaaaagggagaaaacggctctcatgctctctcccataacttccggctggggaggaatggaaaggaaaacccatgtaaaagcgcatgcgcccagccacagcagcggaagaatcaccaggagaaaccctgaaaacatgcggtagttcgggatgccgatcatctcagccgcaacataccggaagcattttccgccgtcaaccgttctccttcaaggattgatttccttgtgggagaacgctatcatgcttccgtttccatgacttacaccatcacacccctgattggagaggaagccatccgcgcgcgcgtcaaggaactggccgcctccattgacgcggccatggcaggcaggccctatattctgctgttgctgctgaacggcgccctccctttcgccacgatgctgaaagggcatttgaaatcccggcccgtggtgaaaaccgtcaagatcaccagctacgccggaatggaacattccggctccgtggcatgggatggggactgcgggccgttccggcctgacgtgcccgttctggtggtggatgacgtgctggatacgggcgctactctggctgaagtttgccgggaattgaaaaggcagggggtgcggcaggttctcaccgccgtggccgtggacaagcactgctgccggaaagtgccttttgaagctgactacgtaggttttacgcagggagatgaatttcttgtaggcttcggcatggacctggatgagcgttaccgggaattgccctacatcgggaaagtggacatgggctgacaaattcccgaattcatattgaacaacctgttgaaaaaaagtgtccaagctagttggagcggcagagccatccgccgtccccgctcaacaagggaaaccggaaaggagaaccaagacatgaaaatcaacagggcaagacaacaggaaagcgtggccgtcttcggccatgaaacgtccctcatccgggatgttctggacaatctggaactggaacacgcgctgacgtggctgctggaggccatcagccagcaccagtccggagaattggaaagcgaaccgtggcatctgtaccagaccacgctgtttgccatgtacgtggactatgacaacgggaaggtgcgcctgtccgccgccctggcatgccacgatgcagacctggaaatatctctgaaggactttgtggagatactgggccgggaagccgccaaggaggcggacccgctccactatactcccggcgcccccagcaagtgcatccaccgctaccgcaacccgtatttcaagcgcaggcggcaggaacgtgagccggacatcgggttttattcctgagccggggagcggcacgatgccgtatcctttccaatggccgggttccgcggggaatccggcctttttgcgggcgttcgttctaccggggaaacgtaggggaagggccgtgaaaaacccggtttatactgttgccgcaatggatgcagggcagcatgttcattactgggcgcactggttcaagcgggcagggaaaaacggaactttattaggagaaaaaacggcatgtcaaaaccggcagtggaaatagtgaacctgggggaacaggccatctggggaatagggaggcaatccggcgatcaaacgatctccgcggatatccatgccctttcagcggcttatcattccctggcttccgtgccgcggggaagcgtgcttcccttctttgttctgtccagaaactatgatggccggaatggttcctttgaactatttgtgggcggcacacttgaaaaagacgggctggagcaggcgtttcttccccccggggaatatgccggaatgacggtcaggccccggctgggatttttatggggcgcggccattggggccgccaaaaggtacttttaccaaaaatggctcccgcagagcccatacgggaccctgaacatggagtacgaactccatacggaaaaaagtattcgcagccatccttccatggacatcttttttgccgttaaaaggaaggaataacggaagaaccggcggctggaagctggcgaggcacattatccggctttcttgtcgccgggccgtgttttccctgccggaggcgccaacattgacagttgcctgtgaaataattagaatggcggcattgggcccagggagatcaatcggaaaagacggggagcaggatgaaaaatcatcataccatcaggattgcgacaaggcgggacgcggcaaagctgcttgaaatttatgctccgtatgtggaaaaaacagccgtcacgtttgaatatgaagtaccggaggtacaggaatttgaggaaagaatcggccatgtgctggaaaaataccccttcctgatttgcgaaagggaaggggaaattgccggttatgcctatgccggcgttttcaagaaccgtgccgcgtaccgctgggccgtggaaacgacggtttacgtccgggaagaccggaaaaaaatgggcatagggcgggaattgtacgcagcgctggaaaagattctttccttgcagaatatcctgaatctaaacgcctgcattgcctgtccggaggcggaagacccctggcttgggcgggacagcgtgcagttccacgaacgtttgggatatcaattcgcaggaaagtttcatcagtgcgggtacaagttcggccgctggtaccatatggtgtggatggaaaaacatctgggagcccacccggacaatcctcccgcagtgaaaacctttgatgaaataaggggcctagttgcggagcagtacgggattttgtaaaggtccggtcaggtaggagtgctgccaatgcgcaagcacgccaaggtatggccggtattaatgaagacagcttttagtggaatatgagaatcattgaaatccaggaaggaactacgttgctgatacggcagctcatggaactgtgggaaaaatctgtcagggagacgcacctgtttttgccggacagcgaaatagaaaatattaaggaatacattccgcaagcattaagagagatacctcatctgatcgttgcggagaacgaaaacgaatttcctgtcggcctgatggggattggcggccagaaacttgaaatgctgttcattgcaagcgaagaacgggggaatggcctcggtaagaagttggtggaatatggaatcgaagcttattccatcaatgaattggccgtgaacgagcaaaatccgctcgccagaggtttttatgaatacatgggctttcaagtccataaaagaacggcccatgacgagcagggaaacccttacccgctcttgtacatgagattgaattgacacgccgccagcttccccttcggcataagaaagcaggtatgggaaaacgcctgtttcatgcgtgcctgttgtgaaagcatttgaaagccttgcgaacgacaggccggttattcacataataaaaatagtgctttttcagagcgatcatccagaatgggcaccgtcatgaccatctcccccttatccggcgcagaagtccgcccccgtttgccctgggtggagactgcgcggctgctggcaacgctggtcgtcgtcatgcagcatgtgccttccggcccctttcttcccaacgaatggctgatcggtccggcgctggcgacgtttttcctgctggcgggatatttttccgcctcccgcctggaggggagcggggctggaaaatggacgggcgggcgcctgctgtccctgctgtggccgtacctcttctggtgtgcggcctactggctggtagcgggcatgtccctttcccctggttcgctggcttccgtgttcggggcgggaacgtgtcccctgctgaccccgatgtggttcctgcgggacctgatgatttttaccctggcggcgttcctgctgcaccgctggcgtcccgcgctttacgcgctcggcctgttctgcctgttcctgcaccggtgggatgacaccctggcgtggcccagtccctatatgttcggggacttcgtgctcggcatcatgctggcgtcttccgcaccgggttgcctggaccgctgggggaagatgcccctggccgtgcacgcgtccattattctggcctctgcggcccttgtctgggcaagctgtgcggataccttcctggttccggacgtcgctttttccggactgattgttctggccttcctgagcttcggaatagtggccagggccgtcagccccgcgctgtcggaacggctggcgcggtggtcgtccggcagctttttcgtgtactgttcccacatcttcgtgctgattgccctgacaggggtggaaacgtgcttcccgtccccgtgggcaccctgggtttggtggtgtctggtgcctgtcgtgtacatgctggcacggggcgtttacctgttcctcaaacggtatttcccgcgtgtcctcgtcctggtgaccgggggaaaatgaacgtaggggcggcgcggatgttccgccccatccgttcagggagctgccatgcggaaggcctggaccggaatggcctctttcctgccgccttccctctgccagaatagttcgggaagcccggggaagccttccgtttccaccagcaggggatgccagcccttttccagcgggatgggcttcagcccagtttttcctgcatctccttccgtcgttccttcccccatggaggaggatacctccgcgccgggcttgtagccgtattccgcatccagcagatgcgcgtcgtgcagcctgacgaacgctttagctccctttttcgccggggttttcatgaagaagacgtatttcccggtttccggaacgttcagataaagctctcttttcatgctgccgtccttccggcggacgccctgggaggactgcgccgtcaggggaaccaggttgccgggcatttcctccttccggagggccggaacaggttctgcatcatagggccgctgggcaaaggtgccgcgcaccgggtgggtataatcgtaaacgcgcctcattctcagcaccttgtcgtgcatgatgggttgcatctttttcccttccggcgtgtcctttaggtcatggcgttccgccgggtccttcgcggtatcgtaaatttcaaacggatccgcatgggactggatgttggtacgcacccccttgtatttgccgaggtagaccatctgctggtcgccccggacggcgttcctcctggacgggagaaaatcctggtagccgggcgtcgtcgtcttgttccgggacatcttggcgctgtattccatgtacaggcggctgtccggctgggttcccttgttcagcagggtggggagcagggaaacgccgtcactccggaagggagccctgacgccgccgatggcggccagcgtagccatccagtcgtggaactgggatggatggtcgctgacggaaccggtcggaacgcggccgggccagcggacgatggtgggaacgcggaagccgccttcccatgcgtcctgtttgatgccgtcaaaaggcccgtaattgcggaagaactgcggattctggccgccttcgtcatgcgggccgttgtccgacgtcataatgatgacggtgttcctgtcaatgttcaggtccttgagagtctggatgaggtcttcaaaggaatcgctcagccgcgcgatcatggtggcgtacttcttctgcgccatgggccatttcttgtccgcataccgcggatagatgtaggagttgatcttgccctccgcggtattcaccagcttgtggggcttcccgatccattgcacgccgccctttacgccgcggccttccggataggggccggtggggatctggagctgggagtggggggctacgtgggtcagcgccaggaagaagggctggcggggattctggcggtgcgtatctataatccattttttggcgcgggccgtcagcaggtccacggagtacgccttgtcgcaatccgccgtgacgcacttgtccccgtcccagatgccgcttctcttggtgggggaaatgggattggggtcttccttgggataatggtggtggccgctgacgtggtccaggtagccgaagtagtagtcaaagccgcgtttggtggggtaggccgtggattcctgcggagtgcccgcgtgttccgttcctccgcctatcccccatttgccgatgagggccgtcctgtacccggcggactgcatgacggtgccgagcgttggggcctgttcgatgggcaggtcaaaggacctgtcccggatcaccttggcatgcccctggtgcacccccgtgaacagggagctgcgggccggggcgcaaagcggggcggaggaataatggcgcgtcagcgtcattccttcgctggccagtgttctcagtccgggattgtccatggcgggcaatccctccttcatgcgctggtcctggtaggaaggcagatccccccagcccatgtcgtccatcaggatcaggatgacgttgggccgctgggcggctgcggtgaaaggaattgccagaaggacggccagcaggggaagcaggcgtttttctttcatttcagcaaaaaatggaatcttactttgcaggcccggtcttgacggaatagcctggatcggcaatccagcgttctcccgattttttcaccggaataaagctgatgccccaggactggaagctgcccgtatacggctgttcaatcaggattttgttttctccggccttcacctggaagggaacggggggacgtgcccaccagaattcctcattgtcaaagggtatttcattggcgggggaattccaggtgtgcttttcataacgccgctgtcctgccagcttgtaggtctggggatttttcacttcctttccgttcacccatattctggtgccgcactgggaccattccccggctgccgggactccggaacagcgccgcgtggagcgggccggagcgtcgaaccccaccatggcgtacatggtgcccgccctgggcgcgtaaaaagtcgtctccgcccaggcggtgttaccgggctttgctttggagaacaggccttccgctcccgcacgggagcggaagtacagattgccgccgcgcgcctggaccggctccagccccgcaggggatttccccgccagcaggccgttcctcacttcctcctgcctgtccttctgaacggggccgaacacggtccattccacaaaggaatcacgccagtaggggaagggcttgtttccggccagggcttccatgcgtttctcaaacagggagaaagcctggtaggcctccgtatccttctccggcagtttgccggcaaagcgggagccatcctccggaaggcccttccagctgcgttcagccatggcgaacatggcgggccactgggggctctggatggggatgttcttcttgtcctccacccgggtatccggccacaggcactggatgacgcccagggagtggtcgtcgctctttgccgttccacagggctggcggaagaaattcctgcgcaccagaatgccggggtcaaaggaattgatgtagcctgccgtggaatcaaaatagggattcttctgcttggcggggtccggcagtcctacggaattctcgtcattccacaactgggcgtagctgtctccggaaacgggcaggtcattgttgcccgcccactggatgggctggcggcccagagatttgaccttggccgccatccggtccgcaaactgcttcccgttggggatgcggatttcatccgcgccgatgtgcaggtagggggacatctccaccggaatttcccggcagaactcttccagcagttcctccagaatcttgatgcccctgggatcgtgcatcgggaagccgaagcagttcttgaaataggtgctgtgccccggcatgtcgatttccgggatgatctggatgtggcgcttcctggcgtagcggaacaggtccctgatctggtcgtaagtgtaggtgtcgttgacgtcccggcccttgatcctcttggaagggtcattcagcacagggtacttcttgcactggatgcgccatgcggggtaatccgtcaggtgccagtggaaggcattcagcttcagccgggccatttcatcaatgtccgccttgagcgtctcaatggaccggaaattgcggcctacgtcatgcatgaagcagcggatggcgaacgccgggctgtctttgatgtcgcagcatggataatcccccccggctcccagctggtccagcgtcctgcgggcataaaaaacgcctgcgtccgtggcggccctgatcaggatgccgccggggcggacctggagctcgtagccttccttgcccagcgtcttggccagagccgcgttctttttcacggaaacaggagcctttttggggcatgtccccgtcttccagtcaacatgggccgggaagggaatgagggctgccggagcggcttcttcctgctggagtggatgcggggaagtccagtctccataggaagagggggaacagagcattaagcctgataccagcaaaaggagggaaggggataatcgcataatattactacacttaaacgaggaactgtctttcatcaaacttaaaatgaagcaaaattccggacttagggatgttccggtttctgccgcattatctcctctttctcctcaggcacaggcttcccagcccgagcaatgcggcagcagccgaggaaggctccggaaccgtgaggccctccatgcggaaattttttacggcaagctcgttgtaagcgtagctgttgtcgagaacgtcggtattcatcaccagataaaaagtggctccctggtcaaacaaattgctgtaatcgtctttggaaattgtccagctataggatttgttgctgacgtctcccgccgaaccggaaatcgtagacccaacctggagaagagaatctccctctcctcccagactgtaccacaggctgaaattttgaggctggcccgtcctgttggtttcgaaaaggccgcctgtatcaaaggaaatcctcagcgcttcatatccggatatggcgttggaggacaattcatgaaatttgacggccgtaaatccgcctcctgcgccgttggcggaaatcagattggtagcgccatccgccgtcacggaggcaagcgtaccggtatctctattcttattgccggaataccatcccgcatccagagagccaaggacggattgaacggcgcttgcggaaggccctccgttcgtgatcagggcgcctccggaggaataatcgatgcgggtgatggaggttttccccatcttcagctccggaataattccgtcaagggaactccacgcctccgctccgtgtgccgatagaactgccgctgcgggtaatgccaggaaaaaggacgttttcatttgtatgtaatttctgttggaaagcggaaaggccgctccgcactggcgcgaattccgctttattcgccatgaaactacagaatttgcaatccgctaaagaaacagcaacagtaaaaaacgggcaatattctgacaataaatgaatgataaatatatctaacattttgtttcccgctatttccccgctggaaaaacaagaggcggtgcccgggaaggtcctgaccatgaatcaagcgagggaaaaaaccggttgacagcggattgcaaatccctgaaacgtattccaatacctgttagtgcgatgaaaatcaggtgattggcagcaagagaaagccttgcttcacgcggaattaccctatccggatgcggatggaatgaacggcatccttgccgaactggtccttcaattttcccagcagggcgccctgccactgctggaggtggtagcgcatggccggctgaagcacctggatggtggcaactcccttgacgatggaaagcaggttggattgctggcccaggaatggccccgcggctttcagccagccttcccggagcagctcggggtccatgccttctccatccagggggagcttggacaggatgtctcccagcagggactccgccgtatggagattccgtgtttcattggtggagggaggaacctggaaccagtccgccagcgcctgcctcacctcctgttcgtcacgggaaaggtattcataccggggcggggaggcgttggggtccggacggtccctgtccggcatgtagggagaccagggagaagccatgagtggaaaataaaagcccggagtgttggatgtcaacagccccgggcggttaaaaaataatatggagaatatattattcgccgtcgtcgccgatagcttccacggggcagccttccatggcttccacgcaggcttcctgttcggtttcgttgtccggctgcttcttgacgtaggagacgccttcgtcgtcatcccgtccaaagttttccggagccgtttcgcggcaaaggtcgcaatcaatgcaggagctgtccacgtaaaacttgccggggacgtttagaggtgttttttcgtcgatgtctgccattatgtatatgggttgtatgaactgcgcccactatttccgcatttgagcaaattttgcaatcttttttgttgcaggaatgagtcagcatgaggaacaatgccgccattcccgttcctggaataaaaggctttttacgatgaatcccgtttcccctcccactccccgtctcctgcccgtctgggcgggcctgctgctggctgcgttttccggcgttctgatggcctgcgccttcattcccgtggactggggaggctgtgtctggataggttttctgccgttgctgacggcgctgtggtacggccgccgccgggaggggaaaaagggaatcctggcgtatgccctgtacggctggatgttcggcgtggtgttttacggcatctccttctggtgggtcaatgaagtcagcacgctgggctatattcccctgatgatattttacggcggcctgtttcccggcatctgggcgctggtcatgggcgtgtttttccgtccggacgcccggccgctgcccggggcgcggcagacggtgaaggaacgcagggcggcgtggaaatcctgggctgtgggggacatgctgcccagcgcttccgccgcgctggggggggcggccctgtgggtgtgcctggaatgggtgaggggctggctcataccgggcttcggctggaacaacctgggcgtggccctttacggaaatccgctggcccagtgggcggaatatgcgggggtaacggccctggccttcctccctgccgtcttttccgtctggctctggcgcgtctgccgccgggccggaaccatggtggtccgtgaaggcaggcgcaccgttccgtgggactttttcacgctggtggcggttctcttaatcatgttcgtcaccggcgtgctctggacggcgcgctactccccgcaatccgccgcagccacggggaacggcaaattcaccgttcccgtcatgaccgtgcagcttaacctgagccagaaggagaaatgggacgcggccaaccggggcgccatttaccgggctctgctggacacgacggagcaggggatgctggacctccagaacagcgtcctggaacaggccgccaaaaacgggacggaagcctccctgaacatgccggcctgggtaatctggccggagagttccttccccatttccacgttttaccgcgattccacgggggaacgctttccgaaccaggacaacgtcaacttcctgagcgtggaggaggactacgtccaggccctccggaacgggatatgcaatttcatcctgctgacgggcacggatgacatttacctgtccgatgaaggccgcgtggcgcgggcctacaactgcctcaccgtctttgaaggggactactccacggccaggccgcacgccaaggccatgctggtccccttcggcgaatacatccccatgcgggaaaccttcccgttcctggaaaaggcctttgaagcctccgccggaacggcaatggggatgaactacacgccgggagcctcctccagccccgtgcccgtgcccatgcgcccggggagctccgccacggtaggagtcattccgctggtttgctttgaggacgtagtgggaagctgggtgcgccgcttcgtgcggcaggaaccccagttgatggtgaacgtcaccaatgacgggtggttcaaccgctcctgcgccaatgaacagcattggcgcaacgcggcgttccggtgcattgagctgcgccgttccatggtccgggccgccaacaccggcgtcagcgtggcgctggctcccaacggcgcggttatcgcggatttgagggattcctccggttccccgttcaccaggggggtaatgaacgccacgctgcccgtgggctgtacggaaatgaccctgtacgccctgttcggggactgggccatcctggcctgtttcctgctgtttgcggctcttctcctgcgcaggatgaatgagggaaagagaaacgccggacccgtgaaggacggcgtttaccggcgcggcgctacgcccaggtaattcctgacctgcttgaacgcggggtaggaaatgccggactcatggcaccagaaggcagaggaagagcctccgtccagattcagggccgtctttacccggaaattccccagtgcgccgggggtcgccagccactccgccagttccctcagggtgacggaggaggatacgccgatgcaccaccgcttgcctccgtccgtggcgatgaaggtgcggtaggtggatttccgggcgttgagccccttgacggctgtgccgttctccaccaggaaaggccctccctgaatggccgcctgcatggcgggcagttttttcatgcgctttagcgcggagctgcggatgaggaacaagccgttctttccgttgtcatacaccactccggacacggcgaaggagcccgtggccagcggagagaggcgcttgccgtcctgaacgacgaggcccaggggagttccctccgcatccgcgccgaagaatccgccgttgacgcctgccgaacaggggctcttgcgcatggccttgtccagggagccgtaccggggcgcccggacgctcccctcatcccgcaccagaaggcggtgcgtgtcagactggaaaaaatagacgttcagcttgtcccgcatggacaggaagccgtcttttctggtgaacacgcggtgctccgcctggacggagccgcagaaaaataaaaggagaaggagaaaacgcagaaaaggcatggttgacagtcaaagggatagatgaaaaatccgccgttccgcacaggtgcctgcgggcacgcgggcgccgggccagacgacgcactccctgaggcggcagccttcctccacgatggcgcgggggccgattacgctggcagcgtccacggaggctccggaagacacttccgccccgggatggatgcgcggagcaggggagggaaagtccagatgggcctggatataggcctccggcgtgcccatgtccatccacaggccgtcgtccgccagcacgccgcgcaggcgcccctgccggatgtaatccagaaacacggggatgatggaaacgatctcgcggggagggatgcggccgaacacctccggctccatgcaataggctccggtaaactggcaggcgcccggatcgcgccccagggcgtgccgcatatccgtcacctggccggaggaaaaatcaaaacccacgttcctcttgtccccggaggtccgcagggccagcgtcacggcggggcggtgcctgacatggtcctccatcacccggcgcaggtcgaaggtggctgccatgtccccgttaatcaccagcaggggttcttccgcggaggccaggggttcgatcttcttcaccccgcctccggaatccagcagcacgggttcatggctgaaatggacggggcagccgttccaggagcgttccgggaacgcctggtcccaggcttccgccagatggtgggtattgatgatgaactcccggatgccgcagtcgtagcagcggcgcatggaatgcagcacgagaggctcatggaaaaagggaatcagcggcttgggcagcacgtgggtaaggggccgcaggcgggtgcccagcccggcgccgaggatgaatgcgcgggaaatgccgggacctgctgtgatgtgcatgcaacatgactaacgggagaaaggcgttttttcaagcgccctttctccgctccctctccggatgacacgccggaatgccctcctttccctgaatttacaggaaaatccgtgatttcgtgctttccaaacgggagctcattcactagcattccccgcatggcatgtggaaaccaaagaactgtcggctctccggcctctctggccggtacctctttgcatacgggacagcccgttaccctgaccctgaagccggcccccgccgacttcggcattaaattccgccgggtggatattccggaccagcccttcatcaacgcggacgtggagaaggtgcagaccgtggagcgcgccaccagcctggcggaaggctccgtcaaggtacacaccgtggaacacattctttccgccctcacgggcatgggcattgacaacgccgtcattgaaatggacgccaacgaaccgcccatcggggacggttcctccgctccctacgtggaactgatcaagagcgccggcattgtggaacaggaagtgccgcggcgctatctggaagtgcgcgaggccgtcaccattgaaaccaagggcggttccatcctgaccattctcccctccaagcaattccgcgtctccgtcacctgcgtgggaccggaaaaccgcatcacccagtactttgacgcggtcatcacgccggaaacgtatgaaaaggaactggccccggcccgcaccttcacgttctacgaggacatcaagcccctgctggaaaagggcctcatcaagggcggcagcctggaaaacgccgtggtcatccgcggggaggagctcatgagcaaggagcccatgcgcttcatcaatgaattcgcccgccacaaggccatggacctcatcggcgacctcagcctgtgcggcaagcccatcctgggccacgtgatcgccatcaagccgggccacggcccgaacaccgagctgaccgccaagctgaagaaggaacaccgccgcaaccagcagatggcgcccaatcccgtcaacgtgccgtacggagacgccgtgctggacatcaatgaagtgatgagcctcctgccgcaccgctatcccttcctgatggtggaccgcatcatcggctttgaaggggaaaccaagtgccgcggcctgaagaacctgacgatgaacgagctcttcttccagggccacttcccgggccatccggtcatgccgggcgtcctgcagctggaagccatggcccaggtcgcctccatcgtcatgctgcgccagcccggcaatgccaccaagctcggctacttcatgagcgcggacaagatcaaattccgccgtcccgtagtccccggcgatacgctcatcattgaggcggagctgaccaagatgcgcggcaacatcggccaggccctcggccgctgcctggtgaacggccaggtggtatcggaagccgaactcaaagtcggcctccaggacatctgaaccggctgataccggcccctgtctttatggaacccccggcccgtgctcgtcacgccggggttttccatgtcctgcatcccgcttggccgtttttctcctggcccctcttggaaataagggcctcccggcccttatgaaaaaggctgctacgcgcatgcaacagggaaagcagaaaagccagagccggcttcactacggagaccggaaccaaaccccggcaatttgacgaatcatgaggggaaggagttcctcattcccaggggcggcggaggcacctctatctgccgcatcagcaagacacgccgggcagacggcacatctccgcatactcttcaaggcgccggcggaaggtttcctccgtcatggaaaggagggcgtccgcggaaaaggactcgcaggtgaaggaggccgccaccgtgccgtacacaatccccctcttcacttcctcaaaggatggaaggacggggggcagggtggccaggtagccggccagcgcccccaggaacgtatctcccgccccggtggggtccaccaatgttttcaggggataggcgggacagcggaaaatttgcagattgcctgcggaatcccgccccagaagcgtggcgccgtattccccctgtttcaccacggcatatgcggcgcccttggaaagcaggaattccccggcttccagcacggtggacgcctgggcgtactccttcgcctcgtcctcgttcatcatggtgatatgggagcggctgatgacggcgtccagcaattccggctggcggcgcagccacttgtccatggaatcggaaagcaccagtgccgcgtccgggcactgttccatgcacttgagctgctgggccggaaccatgcagcagcacaccaggacgggatggttacgcaaggactccggaacgtgcacgttccattccagcatcacggcatcattggcgcagacggtcctgcgcttgttcatgttgtcaaaatattccccggtccaggaaaaggaaggacccttcttgcgttccacgccgtccatgcacagccccttggccgcaagggcttcttcataatgggaggggaaatcctctccgatgatgctgacggcgtccacccggtccgcaaaaagcagggcggccaccgccgcaaaggacaccgagccgcccagaactccctccgcccggttgcggggagtgaggatggtgtctattccaatggttccggtgacaaggaggggctgggacatggaaaaaaggaaatacgtattcaaacgccgggatcaagaataaaaggctggagatatggaaaaaacgggttattttacctgtacgcgcttaaaggaaatgaggctcttccctgggaacgcaccctaaaccgcctgcacggcaggctgatggcttctgtatcacaccggatgcagaagctttgtattcggtgaaggacatccccatacgaacatgaacgcctttacaccaatttcctccgccttctgccgcctttcccggcagcatccggcaacggcatccctggaatctcgcccggagtcttattcccgttcaaccggagaaaagccgctatgatgaaaatactgctgatggtcgggctgggaagctttgcgggcggcgtgctgcgcttcctgctgacccgttttgtccaaatcaactccatgagttcctttccatggggaacgacggcggtcaacttgctgggatgcctggtccttggcgttctctacgggctgttcagccggggtctgctgctgcatacggaaacgcggctttttcttaccgtaggcctgtgcggcggcttcaccaccttttccacgctgatgaatgaatccttcctcctgttgaaggaggggaactttcccgccttctttctttacaccctcctcagctttgccggagggctcattgccattggcctgggatacctggccgccagataagagacaatcatgaacactccggaagaaaacctcatgctgcgcatctacgtcagcagcaccgacaccgtcagacacgtacccgtccacgaggccgtagcctacgctacccgccgctacggcatggcgggctgcaccgtgtacaagggactaatgggggccgggcggcatacgcgcctgatgagccccacattctgggaaattgtcgagaaggtgcccgtcatcattgaaatcgtagacacctcagaacgcattgaaacgttcctgggcaaaatctcctgctggctggacaggctgccgcacggctgcctggtgtgcacgcagcctgtccgcgtttatcctgtcggcggtacccgctcctaggaataggacttttccaggatgctgacgacgtccgccggagtgaacttgcagcggtccagctcaaacaggttgcccatggtggaaaaggccgttctggcgtattcgtcaaacaaatccggggtaatgccgaactcggacatcttcagcttgtccacgccgcaggcctccttcagcttgttcaggccgttcaggaagccgtccacggaagcttcctgccccatggcggcggctaccctggcgtaacgttccgggcaggcgggggcataggcttcatgataggcccaggaaatcatgatcaggcccgcgccgtgcgggagagcgggatggaacgcgctgagggcgtgttcaatggagtgttccgacgtacagcaggaaatggtctccacaaagccggaataggtattggccagggcgacgtaggcgcgcgcttccagatcgtccccgttgctcacggcgcggggaaggtatttggcgatgtattcaatggcctgtagcgcgaacatgtcccccatgggagaggcaatcgtggccatgtacccctccacggcgtggaacagggcgtcaaagccctggtaggccgtcaatttgggcggtacggaaagcatcagctccggatccacgatggacatggtggggaaggtgcccttgaagccgaagccgatcttctcctgcgtatcctccttcgtgatgacggtccacggatccgcttccgttccagtccctgccgtggtggtgatgcaaacgatgggaaggggcttgttgggaatgggaaggcccttgccggaaccgccctggatgtaatcccagtaggttcccggattggcagccatcacggcgatgctcttggcggaatccatgctgctgcctccgcccaggccgacgacgaaatcacaacctgtctccctggcaagcgcggcggcctccatcacgtgctccaccacggggttgggctgcaccttgtcgaaaacgacgctctccactccctggttcttcaacaaagcctgcacccggtccagatacccgagccgcctgacggacgtgccgccgatgacaatcagggccttggcgccgggcaggggagcggaaccaagattgtccaaagaacccgcgccaaagaaaatttgcgcgggcatgaaaaattgaaatggctgatacatggccctactgtataaaacagcggctccggacgtcaaggatgctctgtgcattccatcaactccggagccgccgtgcaggcaacagcctttactgaaaagcgttatgcgtcttcaaaaaaatcgtcgctccgggtggggtccggcttgggcggcttcggcacatccgtgccgatggctccgggatcgtccatttcacggctggtcgtgatcgtggtgggcggcgtcttccttctgggaggccgcaccgcgggacgaggggaggctgaagaggaggaggaagaaccgtccgccatggtttcatcttccgaggaagcgatcatactcttcatgctctggaccagcttgtcccggagggtgcggataccttgttcccggcgcaccgggtctaccgtcgtccggatcagcgtcatcatgttccgcgtggcgttcgcctggtcgcccaggtcaaagcaatccagttcgcagcgccagcgcaggcggtccaggacggaggaatcctgttcgtcaaactcgtcttcggacgcattggcaatgcgtccctgcatgccggacttcttgccggtggaaatggcatggcttaccttgccgagagccacttccatggaaattctcttgccccatgcctgccggagggcgggaagattgcgcgtcttgcggtatcccgtgaagaaaagcttgtcgaaaatctcgtcccggtttttcatggaatccggaaaggccttggaagacatgctgccgatgcccagggcctccccgacctccgtattcaaaacggattgttccgcaatgcgggctccggctttcccggctccccctccattgttatttttggaagaagtggaagagggatcgacaaaatcagggtcggagcaggcggccaggtaggcgttcagcaaatccatggccggcttctggaactccgtaacgtccagagtctcctcctccgttccgccggtggagcttgacgtggcgttcatcaggttttccttgaggcgggccttgaggacgagcacgccccactggtattgaagcatcaatcccttacgggcattcttgtcctggtatttcttggcctcgcggtccatccagtccttcagggaattggaggcaatcttggcgctcttgccctggctcttgtccttctccttttccgcttccatcaggaactttttggactggatcagcaggtcgtacgcggcgctgggatccctgccggcggaattcagcttgctgatggcggcattgatcaccttggtttccgcagacctgttcagggcgagcaggttatccaaatccttgatcaccttcttcttggcatcgttatccatgtgctgcgcataacagagggagcccaggctgaggcctccgatcacgcaaagagagacgaaagtattcatgctttttttattatgacggatgaatgacggtctggcaagagagaagcgaggggaaggggtatccggatgaacttttaaggagggaaaaggaattttcccgtttctgccgcgttataataggttagtcagtgaaagactttttatttttatggagaatacttcaaagcaggagaggacggctagacggggttttcagcgacggatggggatggaagaaaggttggcaatactgaaaacccctttgaatggagaatatttaatcaggacgggaggctctggttcccagaagtgaagcccactggaaaatacagggtgcatggaatgttcccatgtttttgacaggaagcagtccccctggagaacggaggtttggttcgtgcctctttcaggcttcaagccttccgctttccgtccaactgcaaagcggtttcccggccttcgtacagacgcgtggacggacagcaggaagcgacgcatgaaaatcccagcaatgctcttatagaagaaggaaaaacgggcggagattcaccctgatttaatacttcgcataatatatgtaatgcaaaatatggaactagtgaaataaacgcactggactttgattttaaaagatatatgcccgcagaaggcacatggatgagaatagctttattatcccctgggatggaagcggtgatgaatggcattcagccgctgctgttccagatgcgtataaatctgggtggtggaaatatcggcatgccccagcatttcctgaatgatgcggaggtcggcgccgttctccagcagatgcgtggcgaaggaatgccggaggatatgcgggaagacatgctgttctattcccgcggccctggcgcgttcccggagaatctggcgtacccgttccctggtcagcggccgtccgcgcaccgtcaggaaaatatggcttttcgtccccggcttgaccagcctgggcctccctttctccagatacgtcctcaacgcctccaaggcggacctacccacaggcaccagccgcgttttctctcccttccccagcacgcggacaaaggcatcattcatatccaaactctctaatttgcaactgattacctcacttacgcgcatgccgcaggcgtaaatcatctccagcagggccctgtctctacagccgagaggaatatcctgaacgtcaacactttcaagcagtgttgaaacggtttgctgatccagcacatgggggagcgacagcccctgccggggcatttccagaaaggcggaggggtctttttccagcatccccatcccggccagccagcggaaaaagatgcgcaaatgcaccatttccacccgcatggagctgcgggccatgccgcgggcctgcaaatgccggaggaactccgtaagcgtgccgatgtccacacgggaaagatcagcgtcttccgtacccagaaaccgggcgaattcctccagcgtctgcctcacggaaagctggtaggcggcgctcaagcctttctctgcggccagaaaacggatgaagcgttccagatgggctttcatggtgttacctcccctgcccgttaaaaccgttccaccaggaacaggaactctgtcacgttctgcgggcggttcctcaaattccggctgccgcggaatgtggcgtatggcgtttccagcgtgacgatatgtcccagacggccaaggaaattcgtcatttcctcataactgatgaagccctccgaactgtacgaaaggagaatgaacttggccgggcagtcctccagcagccggaacagggccgctggggcatgctgccggctgttgtacgtggagcgtttccaatccgcgggaatgccggaaacacggctggtttccgccggcttctcataggaggacagcaggttcagcatgaaatagttggaaccgtacggatgctgattgtagggagggtccaggtacaccacatccatctccggcaattccgcggccagttcattggcgtcacggcagtggatggaaaaccggcagttaaaccgggaaaacacggggaacggcagtaaaatatcccccaggatgcgggaaagagcgttgccggccgttccgccgaacttgccgacgccgtgcctgtccttgtaaaatcccttgaacacgccggatgtgttcgtatgcacggaagcctccgccagaaggggggcgatgaaatagggccttacctcttccggaagcaaatcgatggtctgccgggccgtatccaggtacacggcgttgcggcgcgtataaaaaacgcggtcttccggcgtgatgctgtccggatttttgggcgcgtacaactccgtgatgaaccccggggactcatgcgtctccatataccgcagcagacgccggtaatgcctctccagctccagattctccacttcctccggattgctcaggtagcaggtgttgacgatgcggctatactcttccagatcattgacaatcaactcttccgaatgctttttcaggaaacgggctacaatgccgctgccggaaaacaggtccccggccttcagcctgtccttccccaggcggcttttcacctgttccagccccatccccaggaagtgcagcagggaacgcttgttgcccagatacgtcacaatctgttccgtcaggtatctgggatcttcctccatctgcgacgctgggagggatgatggctcgttccgggtcatatacaggtctcaaccagcatacggcactccggcctttccgtcaagttgtgccggatacggaaatggaagatatgcccttggaataaggaagaaacccacacctgctgaaagagacgggagggaaatatatggaagggaaatacattttgaaaatttccctgaatagtgagggtgcatttcacgcacgtctcatgaatagaaaataaaatcatgaataattcatctatggatcaattctgctcagagctggtagctaagtccgaatccaagcggtttccgtccgcgttgcgggaatgggaacacgtggaaacatttttgcaggaggaagaaggtacatgcatttgcgggcacgctattagagagcactatatcattcaaaacgtgatcaatagtaaaaaattgatcgctgggaattactgtgtgaaaaaattcatgcacatcggcacctcaaaacactttgatgccatggatacgattggatcaggaagcctgaccgtacctcgcaggaggtttttcaaatgcctagccgcaaatttgatagacttccttcgtaaaaaaagaagaaggccgcccgcttcctttccggaacctctatgtagcgtccctcccctgctccatgcggacatgccggaagaaaggcctttccaaaacagccgtgcatgttatagtgccaacaatcatgaaaaggcatcttctaccctgctccctgctctgcatgctcctggcggcaacaacggccctgggcggtcccggagacacattttacgaagccaacctttccctgacgcgcgccgcgcgcctggagaaggaaggcgattacaaggcagccctggaaagcggcaaaaaagccgcggagctgcttcagtccctgaaaagttcaactccggaatggaatccggagtgggtggccgggaagctggacgccgccgcgcagttgcagcagcgtgtggagcctctggcccaaaaggccggggagagcaagaaggcggattattccctgaaacccggagaacggagggactttaccctgcaacgcgcctacaaggcccatgaacagcaaaaactgattgtcggcgccgttcctgctcccgcccccgttcacggtgcggaacccgggaaatctgccgctcccgcagcttccggccgcacggaaatccgcgttgtcacgccagccgtggccagaccgacggttgtttccagaagatccgcgccttctcgcggcctgcctccccgcacggaccgggacggaaggttccgcatcgggagctgatatgaacaaaagcggaagcttccggaacagttccggttttgcttttcgccttttcctttcaaccataaaaaagagccgcttccccattcatcgggaaagcggctctgtgaattttaacagcgttctcaggcgttctgcctggcggcttcttcaacagccacggccaccgctacggaagcgccgaccatcgggttgttgcccatgccgataaggcccatcatttccacgtgggcgggcacggaggaggagccggcgaactgggcgtccgagtgcatgcggcccatggtatcggtcatgccgtaggaggcgggaccggcagccatgttgtccgggtgcagggtgcggcccgtaccgccgccggaagccacggagaagtacttcttgcccttctcgttgcattccttcttgtaggtgccggctaccgggtgctggaagcgggtggggttggtggagttcccggtgatggagacgtccacgccttcattccacatgacggccacgccttcgcgcacgtcgtcgcagccgtacacgcgcacagcggccttcgggcccttggagaaagccttctcctggacgatgttcagcttgcccgtggcatagtcgaacttggtctgcacgtacgtgaagccattgatgcgggagatgatgtacgcggcatccttgccgaggccgttcaggcagacgcgcaggtcctgcttgcggacgcggttggcggatttggcaatgccgatggcgccttcagcggcggcaaaggattcatggccggccaggaagcagaagcattccgtttcatcgcgcaggagcatggcggccaggttgccgtggcccaggcccaccttgcggtcgtccgcaacggaaccgggaatgcagaaggactggaggccttcaccaatggcttcggcggcgtccgcagccttcgtgcagcccttcttgatggcgatggcggcgcccaccacgtaggcccagccggcgttttcaaacgcgatgggctggatgccgttcacgatttcgcgaacgttgatgcccttggaaaggcagagttgttccgcttcttcaatggagccgatgccgtatttggccagggcttcattgatctgcttgatgcggcggtcgtaggattcgaaaagaggcatgatggtaatagtgcttgaagttgatatactctttttaattcaatctcattcgtgacgaggatcgatgtacttggcggcctcgtcgaaacgaccgtagttgcccgtgcacttggcgacggcttcgttggcgtccacgcccttcttgatcatttccatcatcgggcccatgcgcacgaactcatagccgatgatttcgccgtcttcgtccagagccagcttggtgatgtagccttcggccatttccagatagcgggggcccttggcgcgggtgccgtacagggtgccgatctgggagcggaggcccttgccgaggtcttcaagaccggcgccgatgggcaggccgccttcggagaaagcgctctgggtgcggccgtacacgatctgcaggaacagttcgcgcatggcggtgttgatggcgtcgcacacgaggtccgtgttcatcgcttccagcacggtcttgccgggcaggatttccgcggccatggcggcggagtgggtcatgccggagcagccgctggtttctacaagggcttcctcaacgatgccgttcttgacgttcagcgtcagcttgcaggtgccctgctggggagcgcaccagcccacgccgtgggtcaggccggaaatatccgtgatctccttggattgc
